United States Patent Application Publication US 2024/0117295 A1 - sequence listing, part 7

SEQ ID NO: 6 - DNA, 3977488 bp, Artificial Sequence (residues 1-1,988,744 of 3,977,488)
  Synthetic E.coli genome
agcttttcattctgactgcaacgggcaatatgtctctgtgtggattaaaaaaagagtgtctgatagcagcttctgaactggttacctgccgtgagtaaattaaaattttattgacttaggtcactaaatactttaaccaatataggcatagcgcacagacagataaaaattacagagtacacaacatccatgaaacgcattagcaccaccattaccaccaccatcaccattaccacaggtaacggtgcgggctgacgcgtacaggaaacacagaaaaaagcccgcacctgacagtgcgggctttttttttcgaccaaaggtaacgaggtaacaaccatgcgagtgttgaagttcggcggtacaagtgtggcaaatgcagaacgttttctgcgtgttgccgatattctggaaagcaatgccaggcaggggcaggtggccaccgtcctctctgcccccgccaaaatcaccaaccacctggtggcgatgattgaaaaaaccattagcggccaggatgctttacccaatatcagcgatgccgaacgtatttttgccgaacttttgacgggactcgccgccgcccagccggggttcccgctggcgcaattgaaaactttcgtcgatcaggaatttgcccaaataaaacatgtcctgcatggcattagtttgttggggcagtgcccggatagcatcaacgctgcgctgatttgccgtggcgagaaaatgagcatcgccattatggccggcgtattagaagcgcgcggtcacaacgttactgttatcgatccggtcgaaaaactgctggcagtggggcattacctcgaatctaccgtcgatattgctgagtccacccgccgtattgcggcaagccgcattccggctgatcacatggtgctgatggcaggtttcaccgccggtaatgaaaaaggcgaactggtggtgcttggacgcaacggttccgactactctgctgcggtgctggctgcctgtttacgcgccgattgttgcgagatttggacggacgttgacggggtctatacctgcgacccgcgtcaggtgcccgatgcgaggttgttgaagagcatgtcctaccaggaagcgatggagctttcctacttcggcgctaaagttcttcacccccgcaccattacccccatcgcccagttccagatcccttgcctgattaaaaataccggaaatcctcaagcaccaggtacgctcattggtgccagccgtgatgaagacgaattaccggtcaagggcatttccaatctgaataacatggcaatgttcagcgtttctggtccggggatgaaagggatggtcggcatggcggcgcgcgtctttgcagcgatgagtcgcgcccgtatttccgtggtgctgattacgcaaagttcttccgaatacagcatcagtttctgcgttccacaaagcgactgtgtgcgagctgaacgggcaatgcaggaagagttctacctggaactgaaagaaggcttactggagccgctggcagtgacggaacggctggccattatcagcgtggtaggtgatggtatgcgcaccttgcgtgggatcagcgcgaaattctttgccgcactggcccgcgccaatatcaacattgtcgccattgctcagggatcttctgaacgcagtatctctgtcgtggtaaataacgatgatgcgaccactggcgtgcgcgttactcatcagatgctgttcaataccgatcaggttatcgaagtgtttgtgattggcgtcggtggcgttggcggtgcgctgctggagcaactgaagcgtcagcaaagctggctgaagaataaacatatcgacttacgtgtctgcggtgttgccaacagcaaggctctgctcaccaatgtacatggccttaatctggaaaactggcaggaagaactggcgcaagccaaagagccgtttaatctcgggcgcttaattcgcctcgtgaaagaatatcatctgctgaacccggtcattgttgactgcacttccagccaggcagtggcggatcaatatgccgacttcctgcgcgaaggtttccacgttgtcacgccgaacaaaaaggccaacaccagcagcatggattactaccatcagttgcgttatgcggcggaaaaaagccggcgtaaattcctctatgacaccaacgttggggctggattaccggttattgagaacctgcaaaatctgctcaatgcaggtgatgaattgatgaagttctccggcattctttctggtagcctttcttatatcttcggcaagttagacgaaggcatgagtttctccgaggcgaccacgctggcgcgggaaatgggttataccgaaccggacccgcgagatgatctttctggtatggatgtggcgcgtaaactattgattctcgctcgtgaaacgggacgtgaactggagctggcggatattgaaattgaacctgtgctgcccgcagagtttaacgccgagggtgatgttgccgcttttatggcgaatctgagtcaactcgacgatctctttgccgcgcgcgtggcgaaggcccgtgatgaaggaaaagttttgcgctatgttggcaatattgatgaagatggcgtctgccgcgtgaagattgccgaagtggatggtaatgatccgctgttcaaagtgaaaaatggcgaaaacgccctggccttctatagccactattatcagccgctgccgttggtactgcgcggatatggtgcgggcaatgacgttacagctgccggtgtctttgctgatctgctacgtaccctcagttggaagttaggagtctgacatggttaaagtttatgccccggcttccagtgccaatatgagcgtcgggtttgatgtgctcggggcggcggtgacacctgttgatggtgcattgctcggagatgtagtcacggttgaggcggcagagacattcagtctcaacaacctcggacgctttgccgataagctgccgagtgaaccacgggaaaatatcgtttatcagtgctgggagcgtttttgccaggaactgggtaagcaaattccagtggcgatgaccctggaaaagaatatgccgatcggtagcggcttaggctccagtgcctgtagcgtggtcgcggcgctgatggcgatgaatgaacactgcggcaagccgcttaatgacactcgtttgctggctttgatgggcgagctggaaggccgtatctccggcagcattcattacgacaacgtggcaccgtgttttctcggtggtatgcagttgatgatcgaagaaaacgacatcatcagccagcaagtgccagggtttgatgagtggctgtgggtgctggcgtatccggggattaaagtcagcacggcagaagccagggctattttaccggcgcagtatcgccgccaggattgcattgcgcacgggcgacatctggcaggcttcattcacgcctgctattcccgtcagcctgagcttgccgcgaagctgatgaaagatgttatcgctgaaccctaccgtgaacggttactgccaggcttccggcaggcgcggcaggcggtcgcggaaatcggcgcggtagcgagcggtatctccggctccggcccgaccttgttcgctctgtgtgacaagccggaaaccgcccagcgcgttgccgactggttgggtaagaactacctgcaaaatcaggaaggttttgttcatatttgccggctggatacggcgggcgcacgagtactggaaaactaaatgaaactctacaatctgaaagatcacaacgagcaggtcagctttgcgcaagccgtaacccaggggttgggcaaaaatcaggggctgttttttccgcacgacctgccggaattcagcctgactgaaattgatgagatgctgaagctggattttgtcacccgcagtgcgaagatcctcagcgcgtttattggtgatgaaatcccacaggaaatcctggaagagcgcgtgcgcgcggcgtttgccttcccggctccggtcgccaatgttgaaagcgatgtcggttgtctggaattgttccacgggccaacgctggcatttaaagatttcggcggtcgctttatggcacaaatgctgacccatattgcgggtgataagccagtgaccattctgaccgcgacctccggtgataccggagcggcagtggctcatgctttctacggtttaccgaatgtgaaagtggttatcctctatccacgaggcaaaatcagtccactgcaagaaaaactgttctgtacattgggcggcaatatcgaaactgttgccatcgacggcgatttcgatgcctgtcaggcgctggtgaagcaggcgtttgatgatgaagaactgaaagtggcgctagggttaaacagcgctaacagcattaacatcagccgtttgctggcgcagatttgctactactttgaagctgttgcgcagctgccgcaggagacgcgcaaccagctggttgtcagcgtgccaagcggaaacttcggcgatttgacggcgggtctgctggcgaagagtctcggtctgccggtgaaacgttttattgctgcgaccaacgtgaacgataccgtgccacgtttcctgcacgacggtcagtggagtcccaaagcgactcaggcgacgttatccaacgcgatggacgtgagtcagccgaacaactggccgcgtgtggaagagttgttccgccgcaaaatctggcaactgaaagagctgggttatgcagccgtggatgatgaaaccacgcaacagacaatgcgtgagctaaaagaactgggctacactagcgagccgcacgctgccgtagcttatcgtgcgctgcgtgatcagttgaatccaggcgaatatggcttgttcctcggcaccgcgcatccggcgaaatttaaagagagcgtggaagcgattctcggtgaaacgttggatctgccaaaagagctggcagaacgtgctgatttacccttgcttagtcataatctgcccgccgattttgctgcgttgcgtaaattgatgatgaatcatcagtaaaatctattcattatctcaatcaggccgggtttgcttttatgcagcccggcttttttatgaagaaattatggagaaaaatgacagggaaaaaggagaaattctcaataaatgcggtaacttagagattaggattgcggagaataacaaccgccgttctcatcgagtaatctccggatatcgacccataacgggcaatgataaaaggagtaacctgtgaaaaagatgcaatctatcgtactcgcactttccctggttctggtcgctcccatggcagcacaggctgcggaaattacgttagtcccgagtgtaaaattacagataggcgatcgtgataatcgtggctattactgggatggaggtcactggcgcgaccacggctggtggaaacaacattatgaatggcgaggcaatcgctggcacctacacggaccgccgccaccgccgcgccaccataagaaagctcctcatgatcatcacggcggtcatggtccaggcaaacatcaccgctaaatgacaaatgccgggtaacaatccggcattcagcgcctgatgcgacgctggcgcgtcttatcaggcctacgttaattctgcaatatattgaatctgcatgcttttgtaggcaggataaggcgttcacgccgcatccggcattgactgcaaacttaacgctgctcgtagcgtttaaacaccagttcgccattgctggaggaatcttcatcaaagaagtaaccttcgctattaaaaccagtcagttgctctggtttggtcagccgattttcaataatgaaacgactcatcagaccgcgtgctttcttagcgtagaagctgatgatcttaaatttgccgttcttctcatcgaggaacaccggcttgataatctcggcattcaatttcttcggcttcacgcttttaaaatactcatcactcgccagattaatcaccacattatcgccttgtgctgcgagcgcctcgttcagcttgttggtgatgatatctccccagaattgatacagatctttccctcgggcattctcaagacggatccccatttccagacgataaggctgcattaaatcgagcgggcggagtacgccatacaagccggaaagcattcgcaaatgctgttgggcaaaatcgaaatcgtcttcgctgaaggtttcggcctgcaagccggtgtagacatcacctttaaacgccagaatcgcctggcgggcattcgccggcgtgaaatctggctgccagtcatgaaagcgagcggcgttgatacccgccagtttgtcgctgatgcgcatcagcgtgctaatctgcggaggcgtcagtttccgcgcctcatggatcaactgctgggaattgtctaacagctccggcagcgtatagcgcgtggtggtcaacgggctttggtaatcaagcgttttcgcaggactaataagaatcagcatatccagtccttgcaggaaatttatgccgactttagcaaaaaatgagaatgagttgatcgatagttgtgattactcctggctaacatcatcccacgcgtccggagaaagctggcgaccgatatccggataacgcaatggatcaaacaccgggcgcacgccgagtttacgctggcgtagataatcactggcaatggtatgaaccacagggctgagcagtaaaatggcggtcaaattggtaatagccatgcaggccattatgatatctgccagttgccacatcagcggaaggcttagcaaggtgccgccgatgaccgttgcgaaggtgcagatccgcaaacaccagatcgctttagggttgttcaggcgtaaaaagaagagattgttttcggcataaatgtagttggcaacgatggagctgaaggcaaacagaataaccacaagggtaacaaactcagcaccccaggaacccattagcacccgcatcgccttctggataagctgaataccttccagcggcatgtaggttgtgccgttacccgccagtaatatcagcatggcgcttgccgtacagatgaccagggtgtcgataaaaatgccaatcatctggacaatcccttgcgctgccggatgcggaggccaggacgccgctgccgctgccgcgtttggcgtgctacccattcccgcctcattggaaaacatactgcgctgaaaaccgttagtaatcgcctggcttaaggtatatcccgccgcgccgcctgccgcttcctgccagccaaaagcactctcaaaaatagaccaaatgacgtggggaagttgcccgatattcattacgcaaattaccaggctggtcagtacccagattatcgccatcaacgggacaaagccctgcatgagccgggcgacgccatgaagaccgcgagtgattgccagcagagtaaagacagcgagaataatgcctgtcaccagcgggggaaaatcaaaagaaaaactcagggcgcgggcaacggcgttcgcttgaactccgctgaaaattatgccataggcgatgagcaaaaagacggcgaacagaacgcccatccagcgcatccccagcccgcgcgccatataccatgccggtccgccacgaaactgcccattgacgtcacgttctttataaagttgtgccagagaacattcggcaaagctggtcgccatgccgataaacgcggcaacccacatccaaaagacggctccaggtccaccggcggtaatagccagcgcaacgccggccaggttgccgctacccacgcgcgccgcaagactggtacacaaactctgaaaactggttaaaccgcctggctgtggatgaatgctatttttaagacttttgccaaactggcggatgtagcgaaactgcacaaatccggtgcgaaaagtgaaccaacaacctgcgccgaagagcaggtaaatcattacgcttccccaaaggacgctgttaatgaaggagaaaaaatctggcatgcatatccctcttattgccggccgcgatgactttcctgtgtaaacgttaccaattgtttaagaagtatatacgctacgaggtacttgataacttctgcgtagcatacatgaggttttgtataaaaatggcgggcgatatcaacgcagtgtcagaaatccgaaacagtctcgcctggcgataaccgtcttgtcggcggttgcgctgacgttgcgtcgtgatatcatcagggcagaccggttacatccccctaacaagctgtttaaagagaaatactatcatgacggacaaattgacctcccttcgtcagtacaccaccgtagtggccgacactggggacatcgcggcaatgaagctgtatcaaccgcaggatgccacaaccaacccttctctcattcttaacgcagcgcagattccggaataccgtaagttgattgatgatgctgtcgcctgggcgaaacagcagagcaacgatcgcgcgcagcagatcgtggacgcgaccgacaaactggcagtaaatattggtctggaaatcctgaaactggttccgggccgtatcagtactgaagttgatgcgcgtctttcctatgacaccgaagcgagtattgcgaaagcaaaacgcctgatcaaactctacaacgatgctggtattagcaacgatcgtattctgatcaaactggcttctacctggcagggtatccgtgctgcagaacagctggaaaaagaaggcatcaactgtaacctgaccctgctgttctccttcgctcaggctcgtgcttgtgcggaagcgggcgtgttcctgatcagcccgtttgttggccgtattcttgactggtacaaagcgaataccgataagaaagagtacgctccggcagaagatccgggcgtggtttctgtatctgaaatctaccagtactacaaagagcacggttatgaaaccgtggttatgggcgcaagcttccgtaacatcggcgaaattctggaactggcaggctgcgaccgtctgaccatcgcaccggcactgctgaaagagctggcggagagcgaaggggctatcgaacgtaaactgtcttacaccggcgaagtgaaagcgcgtccggcgcgtatcactgagtccgagttcctgtggcagcacaaccaggatccaatggcagtagataaactggcggaaggtatccgtaagtttgctattgaccaggaaaaactggaaaaaatgatcggcgatctgctgtaatcattcttagcgtgaccgggaagtcggtcacgctacctcttctgaagcctgtctgtcactcccttcgcagtgtatcattctgtttaacgagactgtttaaacggaaaaatcttgatgaatactttacgtattggcttagtttccatctctgatcgcgcatccagcggcgtttatcaggataaaggcatccctgcgctggaagaatggctgacaagcgcgctaaccacgccgtttgaactggaaacccgcttaatccccgatgagcaggcgatcatcgagcaaacgttgtgtgagctggtggatgaaatgagttgccatctggtgctcaccacgggcggaactggcccggcgcgtcgtgacgtaacgcccgatgcgacgctggcagtagcggaccgcgagatgcctggctttggtgaacagatgcgccagatcagcctgcattttgtaccaactgcgatccttagccgtcaggtgggcgtgattcgcaaacaggcgctgatccttaacttacccggtcagccgaagtctattaaagagacgctggaaggtgtgaaggacgctgagggtaacgttgtggtacacggtatttttgccagcgtaccgtactgcattcagttgctggaagggccatacgttgaaacggcaccggaagtggttgcagcattcagaccgaagagtgcaagacgcgacgttagcgaataaaaaaatccccccgagcggggggatctcaaaacaattagtgggattcaccaatcggcagaacggtgcgaccaaactgctcgttcagtacttcacccatcgccagatagattgcgctggcaccgcagatcagcccaatccagccggcaaagtggatgattgcggcgttaccggcaatgttaccgatcgccagcagggcaaacagcacggtcaggctaaagaaaacgaattgcagaacgcgtgcgcctttcagcgtgccgaagaacataaacagcgtaaatacgccccacagacccaggtagacaccaaggaactgtgcatttggcgcatcggtcagacccagtttcggcatcagcagaatcgcaaccagcgtcagccagaaagaaccgtaagaggtgaatgcggttaaaccgaaagtgttgccttttttgtactccagcagaccagcaaaaatttgcgcgatgccgccgtagaaaatgcccatggcaagaataatgccgtccagagcgaaataacccacgttgtgcaggttaagcagaatggtggtcatgccgaagcccatcaggcccagcggtgccggattagccaacttagtgttgcccataattcctcaaaaatcatcatcgaatgaatggtgaaataatttccctgaataactgtagtgttttcagggcgcggcataataatcagccagtggggcagtgtctacgatcttttgaggggaaaatgaaaattttccccggtttccggtatcagacctgagtggcgctaaccatccggcgcaggcaggcgatttgcagtacggctggaatcgtcacgcgataggcgctgccgctgaccgctttaaccccatttagtgccgcacctacagggccttccagccccgcgccgcgcagcaaaccatgcccaagtacgctcattgctgcgtgggtgcgtaaaatgcgggtcagttggctggaaagcaaatggctcacaccttttgccaataatttgtctttcatcagcagcggcagcagctcttccagctcattcaccctggcatcgaccgcgtgcagaaactcctgcttatgttcctcgtccattttcttccaggtattacgcagaaattgttccagtaactgttgctcaatttcaaacgtagacatctctttgtcggctttcagcttcaatcgcttactaacatcgagcaaaatggcccgatacaatttaccgtgtccgcgcagtttgttggcgatactatcgccaccaaaatgctgtaattctccggcaatcagctgccagttgcggcgatgttgctcgggatgcccttccatgcttttaaacagttcgttgcgcatcagtacgctggagaggcgagttttgcctttttcattatgggtgagcaatcgggcgaaatttgccaactgttcctcactacaatgctgaagaaaatccagatcactatcattcaggtaattaacattcattttttgtggcttctatattctggcgttagtcgtcgccgataattttcagcgtggccatatcgctactgttcaccgtatgaccgctaaaggtgattttactgacgcagcgtttattgtcgttatcgctgttaatgttgatccagtcagtggtttgcccttcttttatttcactaggaatattcaggctctgactggcgctacgggcggctttgaaataaacgcttgcaccgcttaactgtaaatcgccatggtcggcagagagttgtatgcgtttcacaatgcgacaaacaggaagtttcagcgccagatcgttggtttcgttacgcggcattgcaatggcgccgaggagtttatggtcgtttgcctgcgccgtgcagcacagcatcaggctaatcgccaggctggcggaaatcgtaaaaacggatttcataaggattctcttagtgggaagaggtagggggatgaatacccactagtttactgctgataaagagaagattcaggcacgtaatcttttctttttattacaattttttgatgaatgccttggctgcgattcattctttatatgaataaaattgctgtcaattttacgtcttgtcctgccatatcgcgaaatttctgcgcaaaagcacaaaaaatttttgcatctcccccttgatgacgtggtttacgaccccatttagtagtcaaccgcagtgagtgagtctgcaaaaaaatgaaattgggcagttgaaaccagacgtttcgcccctattacagactcacaaccacatgatgaccgaatatatagtggagacgtttagatgggtaaaataattggtatcgacctgggtactaccaactcttgtgtagcgattatggatggcaccactcctcgcgtgctggagaacgccgaaggcgatcgcaccacgccttctatcattgcctatacccaggatggtgaaactctagttggtcagccggctaaacgtcaggcagtgacgaacccgcaaaacactctgtttgcgattaaacgcctgattggtcgccgcttccaggacgaagaagtacagcgtgatgtttccatcatgccgttcaaaattattgctgctgataacggcgacgcatgggtcgaagttaaaggccagaaaatggcaccgccgcagatttctgctgaagtgctgaaaaaaatgaagaaaaccgctgaagattacctgggtgaaccggtaactgaagctgttatcaccgtaccggcatactttaacgatgctcagcgtcaggcaaccaaagacgcaggccgtatcgctggtctggaagtaaaacgtatcatcaacgaaccgaccgcagctgcgctggcttacggtctggacaaaggcactggcaaccgtactatcgcggtttatgacctgggtggtggtactttcgatatttctattatcgaaatcgacgaagttgacggcgaaaaaaccttcgaagttctggcaaccaacggtgatacccacctggggggtgaagacttcgacagccgtctgatcaactatctggttgaagaattcaagaaagatcagggcattgacctgcgcaacgatccgctggcaatgcagcgcctgaaagaagcggcagaaaaagcgaaaatcgaactgtcttccgctcagcagaccgacgttaacctgccatacatcactgcagacgcgaccggtccgaaacacatgaacatcaaagtgactcgtgcgaaactggaaagcctggttgaagatctggtaaaccgttccattgagccgctgaaagttgcactgcaggacgctggcctgtccgtatctgatatcgacgacgttatcctcgttggtggtcagactcgtatgccaatggttcagaagaaagttgctgagttctttggtaaagagccgcgtaaagacgttaacccggacgaagctgtagcaatcggtgctgctgttcagggtggtgttctgactggtgacgtaaaagacgtactgctgctggacgttaccccgctgtctctgggtatcgaaaccatgggcggtgtgatgacgacgctgatcgcgaaaaacaccactatcccgaccaagcacagccaggtgttctctaccgctgaagacaaccagtctgcggtaaccatccatgtgctgcagggtgaacgtaaacgtgcggctgataacaaatctctgggtcagttcaacctagatggtatcaacccggcaccgcgcggcatgccgcagatcgaagttaccttcgatatcgatgctgacggtatcctgcacgtttccgcgaaagataaaaacagcggtaaagagcagaagatcaccatcaaggcttcttctggtctgaacgaagatgaaatccagaaaatggtacgcgacgcagaagctaacgccgaagctgaccgtaagtttgaagagctggtacagactcgcaaccagggcgaccatctgctgcacagcacccgtaagcaggttgaagaagcaggcgacaaactgccggctgacgacaaaactgctatcgagtctgcgctgactgcactggaaactgctctgaaaggtgaagacaaagccgctatcgaagcgaaaatgcaggaactggcacaggtttcccagaaactgatggaaatcgcccagcagcaacatgcccagcagcagactgccggtgctgatgcttctgcaaacaacgcgaaagatgacgatgttgtcgacgctgaatttgaagaagtcaaagacaaaaaataatcgccctataaacgggtaattatactgacacgggcgaaggggaatttcctctccgcccgtgcattcatctaggggcaatttaaaaaagatggctaagcaagattattacgagattttaggcgtttccaaaacagcggaagagcgtgaaatcagaaaggcctacaaacgcctggccatgaaataccacccggaccgtaaccagggtgacaaagaggccgaggcgaaatttaaagagatcaaggaagcttatgaagttctgaccgacagccaaaaacgtgcggcatacgatcagtatggtcatgctgcgtttgagcaaggtggcatgggcggcggcggttttggcggcggcgcagacttcagcgatatttttggtgacgttttcggcgatatttttggcggcggacgtggtcgtcaacgtgcggcgcgcggtgctgatttacgctataacatggagctcaccctcgaagaagctgtacgtggcgtgaccaaagagatccgcattccgactctggaagagtgtgacgtttgccacggtagcggtgcaaaaccaggtacacagccgcagacttgtccgacctgtcatggttctggtcaggtgcagatgcgccagggattcttcgctgtacagcagacctgtccacactgtcagggccgcggtacgctgatcaaagatccgtgcaacaaatgtcatggtcatggtcgtgttgagcgcagcaaaacgctgtccgttaaaatcccggcaggggtggacactggagaccgcatccgtcttgcgggcgaaggtgaagcgggcgagcatggcgcaccggcaggcgatctgtacgttcaggttcaggttaaacagcacccgattttcgagcgtgaaggcaacaacctgtattgcgaagtcccgatcaacttcgctatggcggcgctgggtggcgaaatcgaagtaccgacccttgatggtcgcgtcaaactgaaagtgcctggcgaaacccagaccggtaagctattccgtatgcgcggtaaaggcgtcaagtctgtccgcggtggcgcacagggtgatttgctgtgccgcgttgtcgtcgaaacaccggtaggcctgaacgaaaggcagaaacagctgctgcaagagctgcaagaaagcttcggtggcccaaccggcgagcacaacagcccgcgcagtaagagcttctttgatggtgtgaagaagttttttgacgacctgacccgctaacctccccaaaagcctgcccgtgggcaggcctgggtaaaaatagggtgcgttgaagatatgcgagcacctgtaaagtggcggggatcactctacctcaatgtgtatcacaatatccatattctttgtgggggagtctggagattgagtagatattcttgttcagaatgtatcagccgatggttctacgattcttaagccacgaagagttcagatagtacaacggcatgtctcttttgactatctggcaaccggcagtgtgttctctcacgcatcacaaaagcagcaggcataaaaaaacccgcttgcgcgggctttttcacaaagcttcagcaaattggcgattaagccagtttgttgatctgtgcagtcaggttagccttatgacgtgcagctttgtttttgtggatcagacctttagcagcctgacggtccacgatcggttgcatttcgttaaatgctttctgtgcagcagctttgtcgccagcttcgatagctgcgtatactttcttgatgaaagtacgcatcatagagcgacggcttgcgttgtgcttacgagccttttcagactgaatggcgcgcttcttagcacttttgatattagccaaggtccaactcccaaatgtgttctatatggacaattcaaaggccgaggaatatgcccttttagccttcttttgtcaatggatttgtgcaaataagcgccgttaatgtgccggcacagcttacgtagtgatggcgcaggattctaccagcttgcggggtgtgaatacagcttttccgcgataaaaattgcagcaggcggtcagtttcttcccgtgatttgcgccatggcaatgaaaagccacttctttctgattagcgtactcaatcgccggttaaccttgaccgctgtacaaggtatactcggacgatttagcctgttttgagccagacatgaagctgatacgcggcatacataatctcagccaggccccgcaagaagggtgtgtgctgactattggtaatttcgacggcgtgcatcgcggtcatcgcgcgctgttacagggcttgcaggaagaagggcgcaagcgcaacttaccggtgatggtgatgctttttgaacctcaaccactggaactgtttgctaccgataaagccccggcaagactgacccggctgcgggaaaaactgcgttaccttgcagagtgtggcgttgattacgtgctgtgcgtgcgtttcgacaggcgtttcgcggcgttaaccgcgcaaaatttcatcagcgatcttctggtgaagcatttgcgcgtaaaatttcttgccgtaggtgatgatttccgctttggcgctggtcgtgaaggcgatttcttgttattacagaaagctggcatggaatacggcttcgatatcaccagtacgcaaactttttgcgaaggtggcgtgcgcatcagcagcaccgccgtgcgtcaggcccttgcggatgacaatctggctctggcagagagtttactggggcacccgtttgccatctccgggcgtgtagtccacggtgatgaattagggcgcactataggtttcccgacggcgaatgtaccgctgcgccgtcaggtttccccggtgaaaggggtttatgcggtagaagtgctgggcctcggtgaaaagccgttacccggcgtggcaaacatcggaacacgcccaacggttgccggtattcgccagcagctggaagtgcatttgttagatgttgcaatggacctttacggtcgccatatacaagtagtgctgcgtaaaaaaatacgcaatgagcagcgatttgcgagcctggacgaactgaaagcgcagattgcgcgtgatgaattaaccgcccgcgaattttttgggctaacaaaaccggcttaagcctgttatgtaatcaaaccgaaatacggaaccgagaatctgatgagtgactataaaagtaccctgaatttgccggaaacagggttcccgatgcgtggcgatctcgccaagcgcgaacccggaatgctggcgcgttggactgatgatgatctgtacggcatcatccgtgcggctaaaaaaggcaaaaaaaccttcattctgcatgatggccctccttatgcgaatggcagcattcatattggtcacagcgttaacaagattctgaaagacattatcgtgaagtccaaagggctttccggttatgacagcccgtatgtgcctggctgggactgccacggtctgccgatcgagctgaaagtcgagcaagaatacggtaagccgggtgagaaattcaccgccgccgagttccgcgccaagtgccgcgaatacgcggcgacccaggttgacggtcaacgcaaagactttatccgtctgggcgtgctgggcgactggagccacccgtacctgaccatggacttcaaaactgaagccaacatcatccgcgcgctgggcaaaatcatcggcaacggtcacctgcacaaaggcgcgaagccagttcactggtgcgttgactgccgttctgcgctggcggaagcggaagttgagtattacgacaaaacttctccgtccatcgacgttgctttccaggcagtcgatcaggatgcactgaaagcaaaatttgccgtaagcaacgttaacggcccaatcagcctggtaatctggaccaccacgccgtggactctgcctgccaaccgcgcaatctctattgcaccagatttcgactatgcgctggtgcagatcgacggtcaggccgtgattctggcgaaagatctggttgaaagcgtaatgcagcgtatcggcgtgaccgattacaccattctcggcacggtaaaaggtgcggagcttgagctgctgcgctttacccatccgtttatgggcttcgacgttccggcaatcctcggcgatcacgttaccctggatgccggtaccggtgccgttcacaccgcgcctggccacggcccggacgactatgtgatcggtcagaaatacggcctggaaaccgctaacccggttggcccggacggcacttatctgccgggcacttatccgacgctggatggcgtgaacgtcttcaaagcgaacgacatcgtcgttgcgctgctgcaggaaaaaggcgcgctgctgcacgttgagaaaatgcagcacagctatccgtgctgctggcgtcacaaaacgccgatcatcttccgcgcgacgccgcagtggttcgtcagcatggatcagaaaggtctgcgtgcgcagagtctgaaagagatcaaaggcgtgcagtggatcccggactggggccaggcgcgtatcgagagcatggttgctaaccgtcctgactggtgtatctcccgtcagcgcacctggggtgtaccgatgagtctgttcgtgcacaaagacacggaagagctgcatccgcgtacccttgaactgatggaagaagtggcaaaacgcgttgaagtcgatggcatccaggcgtggtgggatctcgatgcgaaagagatcctcggcgacgaagctgatcagtacgtgaaagtgccggacacattggatgtatggtttgactccggatctacccactcttctgttgttgacgtgcgtccggaatttgccggtcacgcagcggacatgtatctggaaggttctgaccaacaccgcggctggttcatgtcttccctaatgatctccaccgcgatgaagggtaaagcgccgtatcgtcaggtactgacccacggctttaccgtggatggtcagggccgcaagatgtctaaatccatcggcaataccgttagcccgcaggatgtgatgaacaaactgggcgcggatattctgcgtctgtgggtggcaagtaccgactacaccggtgaaatggccgtttctgacgagatcctgaaacgtgctgccgatagctatcgtcgtatccgtaacaccgcgcgcttcctgctggcaaacctgaacggttttgatccagcaaaagatatggtgaaaccggaagagatggtggtactggatcgctgggccgtaggttgtgcgaaagcggcacaggaagacatcctcaaggcgtacgaagcatacgatttccacgaagtggtacagcgtctgatgcgcttctgctccgttgagatgggttccttctacctcgacatcatcaaagaccgtcagtacaccgccaaagcggacagtgtggcgcgtcgtagctgccagactgcgctatatcacatcgcagaagcgctggtgcgctggatggcaccaatcctctccttcaccgctgatgaagtgtggggctacctgccgggcgaacgtgaaaaatacgtcttcaccggtgagtggtacgaaggcctgtttggcctggcagacagtgaagcgatgaacgatgcgttctgggacgagctgttgaaagtgcgtggcgaagtgaacaaagtcattgagcaagcgcgtgccgacaagaaagtgggtggcagcctggaagcggcagtaaccttgtatgcagaaccggaactgagcgcgaaactgaccgcgctgggcgatgaattacgatttgtcctgttgacctccggcgctaccgttgcagactataacgacgcacctgctgatgctcagcagagcgaagtactcaaagggctgaaagtcgcgttgagtaaagccgaaggtgagaagtgcccacgctgctggcactacacccaggatgtcggcaaggtggcggaacacgcagaaatctgcggccgctgtgtcagcaacgtcgccggtgacggtgaaaaacgtaagtttgcctgatgagtcaaagcatctgtagtacagggctacgctggctgtggctggtggtagtcgtgctgattatcgatctgggcagcaaatacctgatcctccagaactttgctctgggggatacggtcccgctgttcccgagccttaatctgcattatgcgcgtaactatggcgcggcgtttagtttccttgccgatagcggcggctggcagcgttggttctttgccggtattgcgattggtattagcgtgatcctggcagtgatgatgtatcgcagcaaggccacgcagaagctaaacaatatcgcttacgcgctgattattggcggcgcgctgggcaacctgttcgaccgcctgtggcacggcttcgttgtcgatatgatcgacttctacgtcggcgactggcacttcgccaccttcaaccttgccgatactgccatctgtgtcggtgcggcactgattgtgctggaaggttttttgccttctagagcgaaaaaacaataataaaccctgccggatgcgatgctgacgcatcttatccggcctacagattgctgcgaaatcgtaggccggataaggcgtttacgccgcatccggcaaaaatccttaaatataagagcaaacctgcatgtctgaatctgtacagagcaatagcgccgtcctggtgcacttcacgctaaaactcgacgatggcaccaccgccgagtctacccgcaacaacggtaaaccggcgctgttccgcctgggtgatgcttctctttctgaagggctggagcaacacctgttggggctgaaagtgggcgataaaaccaccttcagcttggagccagatgcggcgtttggcgtgccgagtccggacctgattcagtacttctcccgccgtgaatttatggatgcaggcgagccagaaattggcgcaatcatgctttttaccgcaatggatggcagtgagatgcctggcgtgatccgcgaaattaacggcgactccattaccgttgatttcaaccatccgctggccgggcagaccgttcattttgatattgaagtgctggaaatcgatccggcactggaggcgtaacatgcagatcctgttggccaacccgcgtggtttttgtgccggggtagaccgcgctatcagcattgttgaaaacgcgctggccatttacggcgcaccgatatatgtccgtcacgaagtggtacataaccgctatgtggtcgatagcttgcgtgagcgtggggctatctttattgagcagattagcgaagtaccggacggcgcgatcctgattttctccgcacacggtgtttctcaggcggtacgtaacgaagcaaaaagtcgcgatttgacggtgtttgatgccacctgtccgctggtgaccaaagtgcatatggaagtcgcccgcgccagtcgccgtggcgaagaatctattctcatcggtcacgccgggcacccggaagtggaagggacaatgggccagtacagtaacccggaagggggaatgtatctggtcgaaagcccggacgatgtgtggaaactgacggtcaaaaacgaagagaagctctcctttatgacccagaccacgctgagcgtggatgacacgtctgatgtgatcgacgcgctgcgtaaacgcttcccgaaaattgtcggtccgcgcaaagatgacatctgctacgccacgactaaccgtcaggaagcggtacgcgccctggcagaacaggcggaagttgtgttggtggtcggtagcaaaaactcctccaactccaaccgtctggcggagctggcccagcgtatgggcaaacgcgcgtttttgattgacgatgcgaaagacatccaggaagagtgggtgaaagaggttaaatgcgtcggcgtgactgcgggcgcaagcgctccggatattctggtgcagaatgtggtggcgcgtttgcagcagctgggcggtggtgaagccattccgctggaaggccgtgaagaaaacattgttttcgaagtgccgaaagagctgcgtgtcgatattcgtgaagtcgattaagtcattagcagcctaagttatgcgaaaatgccggtcttgttaccggcattttttatggagaaaacatgcgtttacctatcttcctcgatactgaccccggcattgacgatgccgtcgccattgccgccgcgatttttgcacccgaactcgacctgcaactgatgaccaccgtcgcgggtaatgtcagcgttgagaaaactacccgcaatgccctgcaactgctgcatttctggaatgcggagattccgctcgcccaaggggccgctgtgccactggtacgcgcaccgcgtgatgcggcatctgtgcacggcgaaagcggaatggctggctacgactttgttgagcacaaccgaaagccgctcgggataccggcgtttctggcgattcgggatgccctgatgcgtgcaccagagcctgttaccctggtggccatcggcccgttaaccaatattgcgctgttacttagtcaatgcccggaatgcaagccgtatattcgccgtctggtgatcatgggtggttctgccggacgcggcaactgtacgccaaacgccgagtttaatattgctgccgatccagaagctgctgcctgtgtcttccgcagtggtattgaaatcgtcatgtgcggtttggatgtcaccaatcaggcaatattaactcctgactatctctctacactgccgcagttaaaccgtaccgggaaaatgcttcacgccctgtttagccactaccgtagcggcagtatgcaaagcggcttgcgaatgcacgatctctgcgccatcgcctggctggtgcgcccggacctgttcactctcaaaccctgttttgtggcagtggaaactcagggcgaatttaccagtggcacgacggtggttgatatcgacggttgcctgggcaagccagccaatgtacaggtggcattggatctggatgtgaaaggcttccagcagtgggtggctgaggtgctggctctggcgagctaacctgtcacatgttattggcatgcagtcattcatcgactcatgcctttcactgatatccctccctgtttatcattaatttctaattatcagcgtttttggctggcggcgtagcgatgcgctggttactctgaaaacggtctatgcaaattaacaaaagagaatagctatgcatgatgcaaacatccgcgttgccatcgcgggagccggggggcgtatgggccgccagttgattcaggcggcgctggcattagagggcgtgcagttgggcgctgcgctggagcgtgaaggatcttctttactgggcagcgacgccggtgagctggccggagccgggaaaacaggcgttaccgtgcaaagcagcctcgatgcggtaaaagatgattttgatgtgtttatcgattttacccgtccggaaggtacgctgaaccatctcgctttttgtcgccagcatggcaaagggatggtgatcggcactacggggtttgacgaagccggtaaacaagcaattcgtgacgccgctgccgatattgcgattgtctttgctgccaattttagcgttggcgttaacgtcatgcttaagctgctggagaaagcagccaaagtgatgggtgactacaccgatatcgaaattattgaagcacatcatagacataaagttgatgcgccgagtggcaccgcactggcaatgggagaggcgatcgcccacgcccttgataaagatctgaaagattgcgcggtctacagtcgtgaaggccacaccggtgaacgtgtgcctggcaccattggttttgccaccgtgcgtgcaggtgacatcgttggtgaacataccgcgatgtttgccgatattggcgagcgtctggagatcacccataaggcgtccagccgtatgacatttgctaacggcgcggtaagaagcgctttgtggttgagtggtaaggaaagcggtctttttgatatgcgagatgtacttgatctcaataatttgtaaccacaaaatatttgttatggtgcaaaaataacacatttaatttattgattataaagggctttaatttttggcccttttatttttggtgttatgtttttaaattgtctataagtgccaaaaattacatgttttgtcttctgtttttgttgttttaatgtaaattttgaccatttggtccacttttttctgctcgtttttatttcatgcaatcttcttgctgcgcaagcgttttccagaacaggttagatgatctttttgtcgcttaatgcctgtaaaacatgcatgagccacaaaataatataaaaaatcccgccattaagttgacttttagcgcccatatctccagaatgccgccgtttgccagaaattcgtcggtaagcagatttgcattgatttacgtcatcattgtgaattaatatgcaaataaagtgagtgaatattctctggagggtgttttgattaagagtgcgctattggttctggaagacggaacccagtttcacggtcgggccataggggcaacaggtagcgcggttggggaagtcgttttcaatactagtatgaccggttatcaagaaatcctcactgatccttcctattctcgtcaaatcgttactcttacttatccccatattggcaatgtcggcaccaatgacgccgatgaagaatcttctcaggtacatgcacaaggtctggtgattcgcgacctgccgctgattgccagcaacttccgtaataccgaagacctctcttcttacctgaaacgccataacatcgtggcgattgccgatatcgatacccgtaagctgacgcgtttactgcgcgagaaaggcgcacagaatggctgcattatcgcgggcgataacccggatgcggcgctggcgttagaaaaagcccgcgcgttcccaggtctgaatggcatggatctggcaaaagaagtgaccaccgcagaagcctatagctggacacaagggagctggacgttgaccggtggcctgccagaagcgaaaaaagaagacgagctgccgttccacgtcgtggcttatgattttggtgccaagcgcaacatcctgcggatgctggtggatagaggctgtcgcctgaccatcgttccggcgcaaacttctgcggaagatgtgctgaaaatgaatccagacggcatcttcctctccaacggtcctggcgacccggccccgtgcgattacgccattaccgccatccagaaattcctcgaaaccgatattccggtattcggcatctgtctcggtcatcagctgctggcgctggcgagcggtgcgaagactgtcaaaatgaaatttggtcaccacggcggcaaccatccggttaaagatgtggagaaaaacgtggtaatgatcaccgcccagaaccacggttttgcggtggacgaagcaacattacctgcaaacctgcgtgtcacgcataaatccctgttcgacggtacgttacagggcattcatcgcaccgataaaccggcattcagcttccaggggcaccctgaagccagccctggtccacacgacgccgcgccgttgttcgaccactttatcgagttaattgagcagtaccgtaaaaccgctaagtaatcaggagtaaaagagccatgccaaaacgtacagatataaaaagtatcctgattctgggtgcgggcccgattgttatcggtcaggcgtgtgagtttgactactctggcgcgcaagcgtgtaaagccctgcgtgaagagggttaccgcgtcattctggtgaactccaacccggcgaccatcatgaccgacccggaaatggctgatgcaacctacatcgagccgattcactgggaagttgtacgcaagattattgaaaaagagcgcccggacgcggtgctgccaacgatgggcggtcagacggcgctgaactgcgcgctggagctggaacgtcagggcgtgttggaagagttcggtgtcaccatgattggtgccactgccgatgcgattgataaagcagaagaccgccgtcgtttcgacgtagcgatgaagaaaattggtctggaaaccgcgcgttccggtatcgcacacacgatggaagaagcgctggcggttgccgctgacgtgggcttcccgtgcattattcgcccatcctttaccatgggcggtagcggcggcggtatcgcttataaccgtgaagagtttgaagaaatttgcgcccgcggtctggatctctctccgaccaaagagttgctgattgatgagagcctgatcggctggaaagagtacgagatggaagtggtgcgtgataaaaacgacaactgcatcatcgtctgctctatcgaaaacttcgatgcgatgggcatccacaccggtgactccatcactgtcgcgccagcccaaacgctgaccgacaaagaatatcaaatcatgcgtaacgccagcatggcggtgctgcgtgaaatcggcgttgaaaccggtggttccaacgttcagtttgcggtgaacccgaaaaacggtcgtctgattgttatcgaaatgaacccacgcgtgtcccgttctagcgcgctggcgagcaaagcgaccggtttcccgattgctaaagtggcggcgaaactggcggtgggttacaccctcgacgaactgatgaacgacatcactggcggacgtactccggcctccttcgagccgtccatcgactatgtggttactaaaattcctcgcttcaacttcgaaaaattcgccggtgctaacgaccgtctgaccactcagatgaaaagcgttggcgaagtgatggcgattggtcgcacgcagcaggaatccctgcaaaaagcgctgcgcggcctggaagtcggtgcgactggattcgacccgaaagtgagcctggatgacccggaagcgttaaccaaaatccgtcgcgaactgaaagacgcaggcgcagatcgtatctggtacatcgccgatgcgttccgtgcgggcctgtctgtggacggcgtcttcaacctgaccaacattgaccgctggttcctggtacagattgaagagctggtgcgtctggaagagaaagtggcggaagtgggcatcactggcctgaacgctgacttcctgcgccagctgaaacgcaaaggctttgccgatgcgcgcttggcaaaactggcgggcgtacgcgaagcggaaatccgtaagctgcgtgaccagtatgacctgcacccggtttataagcgcgtggatacctgtgcggcagagttcgccaccgacaccgcttacatgtactccacttatgaagaagagtgcgaagcgaatccgtctaccgaccgtgaaaaaatcatggtgcttggcggcggcccgaaccgtatcggtcagggtatcgaattcgactactgttgcgtacacgccagcctggcgctgcgcgaagacggttacgaaaccattatggttaactgtaacccggaaaccgtctccaccgactacgacacttccgaccgcctctacttcgagccggtaactctggaagatgtgctggaaatcgtgcgtatcgagaagccgaaaggcgttatcgtccagtacggcggtcagaccccgctgaaactggcgcgcgcgctggaagctgctggcgtaccggttatcggcaccagcccggatgctatcgaccgtgcagaagaccgtgaacgcttccagcatgcggttgagcgtctgaaactgaaacaaccggcgaacgccaccgttaccgctattgaaatggcggtagagaaggcgaaagagattggctacccgctggtggtacgtccgtcttacgttctcggcggtcgggcgatggaaatcgtctatgacgaagctgacctgcgtcgctacttccagacggcggtcagcgtgtctaacgatgcgccagtgttgctggaccacttcctcgatgacgcggtagaagttgacgtggatgccatctgcgacggcgaaatggtgctgattggcggcatcatggaacatattgagcaggcgggcgtgcactccggtgactccgcatgttctctgccagcctacaccttaagtcaggaaattcaggatgtgatgcgccagcaggtgcagaaactggccttcgaattgcaggtgcgcggcctgatgaacgtgcagtttgcggtgaaaaacaacgaagtctacctgattgaagttaacccgcgtgcggcgcgtaccgttccgttcgtctccaaagccaccggcgtaccgctggcaaaagtggcggcgcgcgtgatggctggcaaaagcctggctgagcagggcgtaaccaaagaagttatcccgccgtactacagcgtgaaagaagtggtgctgccgttcaataaattcccgggcgttgacccgctgttagggccagaaatgcgctctaccggggaagtcatgggcgtgggccgcaccttcgctgaagcgtttgccaaagcgcagctgggcagcaactccaccatgaagaaacacggtcgtgcgctgctttccgtgcgcgaaggcgataaagaacgcgtggtggacctggcggcaaaactgctgaaacagggcttcgagctggatgcgacccacggcacggcgattgtgctgggcgaagcaggtatcaacccgcgtctggtaaacaaggtgcatgaaggccgtccgcacattcaggaccgtatcaagaatggcgaatatacctacatcatcaacaccaccagtggccgtcgtgcgattgaagactcccgcgtgattcgtcgcagtgcgctgcaatataaagtgcattacgacaccaccctgaacggcggctttgccaccgcgatggcgctgaatgccgatgcgactgaaaaagtaattagcgtgcaggaaatgcacgcacagatcaaataatagcgtgtcatggcagatatttttcatccgctaatttgatcgaataactaatacggttctctgatgaggaccgtttttttttgcccattaagtaaatcttttggggaatcgatatttttgatgacataagcaggatttagctcacacttatcgacggtgaagttgcatactatcgatatatccacaattttaatatggccttgtttaattgcttcaaaacgagtcatagccagacttttaatttgtgaaactggagttcgtatgtgtgaaggatatgttgaaaaaccactctacttgttaatcgccgaatggatgatggctgaaaatcggtgggtgatagcaagagagatctctattcatttcgatattgaacacagcaaggcggttaataccctgacttatattctgagcgaagtcacagaaataagctgcgaagttaagatgatccctaataagctggaagggcggggatgccagtgtcagcgactggttaaagtggtcgatatcgatgagcaaatttacgcgcgcctgcgcaataacagtcgggaaaaattagtcggtgtaagaaagacgccgcgtattcctgccgttccgctcacggaacttaaccgcgagcagaagtggcagatgatgttgagtaagagtatgcgtcgttaattttatctcgttgataccgggcgtcctgcttgccagatgcgatgttgtagcatcttatccagcaaccaggtcgcatccggcaagatcaccgtttaggcgtcacatccgtcgtcccctgcaaacgggggcgattttcctccatttgcctcagtggctgcgtttcatgtaagcttacatgacagcgcccgacaagatcctgatactctttggtattcaaccgtttccagtgtaactcgtcgtcactaacattgcgtacagcgcgggctggcgtacccatcaacaactggcgtttctcgccgcgaaagcccgctttgacaaagctcatggcggcaacaatgctctcttcgccaatgaccgcgccatccataatcacgctgttcatcccgaccaatgcatcgcgaccaatcaaacaaccatgcaggatcgctccgtgcccgatatggccgttttccccaacgatagtgtcagtgtcgcagtagccatgcataatgcagccatcctgaatattggctcccgcttgcacgatcaaccgcccgtagtcaccacgcagactggcgagtgggccgatgtagacaccggctcccacaatcacatcgccaatcaagacggcactgggatggacaaacgccgtcgggtgaaccaccggaattaacccctcaaaggcgtaatagctcacggttgttaacgtcctttccacaccggatcgcgcttctcggcaaacgccagcggcccttcaatggcatcttcgctatgcagaacgcttggatagtgtttcaacacgccgctgcgaatatagcgatacgcttcttctaccggcatttcgctggtggtgcggtagatctctttcagcgccgcaatcgccagcggggcgctgttaaccagctgctgagccagttcgcgggcgttatccatcagttccgcctggctaaccacgcggttgactatcccccaacgcagcgcctcttctgcgcccattcgtctgccggtcatcaccatttcattgacgatggcaggcggcaggatcttcggcagacgcagcacaccgccgctgtcaggaacgatgcccagtttggcttccggcagggcgaagctggcgttatcggcacaaacaataaaatctgccgccagcgccagttcaaagccgccgccaaaggcatagccgttcacagctgcgataaccggtttgtcgagattgaaaatttcggttaatcccgcaaaaccacccggaccaaagtcagcatccggtgcttcgccttctgctgccgcttttaaatcccagcccgcggaaaagaacttctctccggcaccggtaataatggcgacacgtaattgcggatcgtcacggaaatttagaaatacttcgcccatttcaaagctggtttttgcatcaatagcattcgcttttggacgatcaagggtaatttccagaatacttccattgcgggtcagatgtaaactttcactcattccttttctccatttttgctttttcagggagctcaacatccctgcaaaaaatgcatattgttttagagtgtgattattagctggcagggtagttccctgctgtttcatttatttcagattctttctaattattttcccgctgcaattacgtggcagatcttttctgatctccagataagagggcactttaaatttcgccatattttgttcgcagaagcggaaaaattcctcttcgctcaatgtttcaccttcattcagcaccacaaatgctttgatggcttcatcgcgaatgctatctttaatacccacaaccacgatgtcctgaattttcgggtgcgcggcgataatattttccagctccacgcaggagacattctcgccgccacgtttaatcatattgcagcggcgatcgacgaaataaaaaaagtcctcttcgtcgcggtatccggtatcgccggtatgcagccagccatcggcttccagcactttcgcagtggcttgtgggttgagaaagtactctttgaagatggttttcccaggtatgcctttaatgcagatttcaccgatctcaccagccgggagcgggcgattgtgatcgtcgcggatctccgcttcgtagcaaaaccccacccgaccaatgctcggccagcgtcgtttatcgccaggacgatcgccgataatgcccacaatggtttccgtcatcccataagacgtcagcaagcgaacgccgaagcgttcacaaaacgcatctttttcctgctcgctcaagttgagataaaacatcacttcccgcaggcggtgttgctgatcgttcgcactaggcggctgtaccatcaacgtacggatcatcatcggaatacattcggtaacggtggcgcggtacttctgtacctgtccccagaaggcgcgggcgctgtatttctcgaccagcacaaaggtggccccggcagaaaacgccgccatcgccgcagtacactggcaatcgatatgaaacgcaggcattaccgtcaggtagacgtcatcgtcacgcagtgcacactgccaggcggagtaatatccagcgaagcgcaggttgtaatgggtaatcaccacacctttcggtcgggaggtggtgccggaggtgaagagaatttccgccgtatcgtcagtgcttagcggcggtgcatagcacaaggtggcaggttgttgatttttcagttgagtaaagctactcacgccatcatcagcgggaagtgccacatctgtcaggcaaatgtgccgcaattgagtggcatcttcctgctgaatctgttgatacataggatagaattgcgcactggtcaccagcaggcacgcctggctattttgcaggatccacgcgctttccttgcacaacaggcgggcgttaatcggcaccataatcgcgccaatttttgccagcccgaaccagcaaaagataaattccgggcagttgtcgagatgtagtgcaaccttgtcgcctttgcgaatccccagcgtataaaacaggtttgccgtgcggttaatctcctgatttaactcaagataactataccggttaacgactccgccgctggattcacaaatcagcgccgttttatgaccgtaaacgtccgcaagatcgtcccacatttgacgtagatgttgtccgccaatgatatccattgcacctctatccatttttgttcgtttgttattgggcgggcgctagtcaggcaagccgactgacgccacgcgtttagtcctcaactttggccagacctttgctgaccaactcctgaatgtcgttttcgctgtagccgatatttttcaaaatggcagccgtgtccataccatgactgggcattccgcgccagatttgtccggggttatttttgaatttcggcatgatgttcggccctttgcaggtgcgaccatccatcgtttgccactgagtgatactttcgcgagccacatactgtggattgctttccagttccggtacggtcagcactttggcgcaggcgatattcagttcagcaaagcgttcttttacttccgcgatggtatgtgtcgccagccaggcatcgagtttctcttcaaccagtgggccgtaagggcattcgatacggtggataagctgagtgccttccgggatttctggcgtgccaagcagatgtgcgaggccaatatctttaaagcactcttcaatttgggtaatgcccaccagttccatcacgatgtagccgtcggcacatttatacagaccgcaaccggcgtagtagggatctttacctttgctcatgcgcgggcacatttcgccgccgttgaagtaatccatcatgaagtactggcccatacgcagcatcacttcatacatggcgatgtcgatactttcgcctttaccggtttcacgcactttatgcagtgctgccagcgccgccgtggtggcggtcaggccagaaaagtaatcggcggtatacgggaaggcaggcattggctggtcaacatcaccgttctgaatcaggtaaccactaaaggcctgggcgatagtgttataggccggaagattggtgtactcctcggtgccgtactgaccaaaaccggacaggtgagcgataaccagtttcgggttgtgctgccacagtacttcatcggtaatgccacgacgggcaaaggccggacctttactggcttcgatgaagatatcggtggtttccattaatttcagaaacgcttcgcggccttcatctttgaaaatatttaagctcagcgcgtgcaaattgcggcgggagagttgcgggtagttcggttgaacgcgaatggtgtcggcccaggcgacgttctcgatccagataacttccgcgccccattctgcgaacatttgcccggcaaacggtccggcgatttcgataccggagaagacaacgcgcaatccggccaacggcccgaatttcggcatgggtagatgatccattatttgctcctgaaaaatttatgtagcgcatgactgccggatgcggcgtaaacgctttatccggcctacattcgtgctcccgtaggcctgataagacgcatcagcgtcgcatcaggcagcgcacggacttagcggtattgcttcagcaccgcacgacccagcgtcaggatctgcatttcgtcagatcccccggagacgcggtctacacgcagatcacgccagaagcggctgatgcggtggttgcccgcaatcccgacaccgcccagcacctgcattgcgctatccacaacttcaaatgccgcattggcgcagaagtatttgcacatcgctgcatcgccagaggtgatggtgccgttgtctgctttccacgctgcttcatacagcatgtttttcatggagtttaatttgatcgccatgtgggcgaatttttcctgaatcaactggaaacgaccaatagcctcgccaaactgcacgcgctgattggcgtagcgcgccgcatcttcaaaggcgcacatcgccgtaccgtagttggtgagggctaccaggaaacgttcatggtcgaactcttctttgacgcggttaaagccgttaccttcccgaccgaacatgtctttctcgtccagttccacgtcgtcaaaggtgatttcacagcagctatccatacgcagaccgagcttttcaagtttggtcactttgatgcccggtttgctcatatcaacaaaccattcggtgtagacaggtttgtccggagaagccccgtcgcgcgccatcaccacgatgtacggggtgtaggcgctgctggtaataaaacacttactaccattaagataaatcttaccatttctacgggtataagtcgttttcaggctacccacgtcggagcccgcgcccggttcggtaatcgcactgttccacatctgcttaccggtgccgcggaaagccataattttgtcgatctgctcttgtgtgccttcgcgcaggaaggtgttgaacccgcccggcaactggtacagcacataggttggtgcccccagacgtcccagctccatccacacggcggcgagagtaacaaaccccgcgtccagaccaccgtgctcttcagggatcagcagactgtcgatacccatatccgccagtgctttgacaaaacgttccgggtagacgctgtcacggtcgcactcggcaaaataggcctcccagttttcgctggccatcagttcgcggataccggcgacaaacagttcctgctcatcatttaaattaaaatccatctttcaacctcttgatattttgggggttaattaatctttccagttctgtttcgcgtctttaataaaggagagcgtcaccataatgttgacgaagaacagcgggcatcctccggcgataatggcggtttgaatcggtttcaggccgccgagcgccagcagaacaataccgataatgccaaccagaatactccaaccgatacgcaccagcagaggtggttcttcaccatcgcgtacttcgcggcaagtggacatcgccagggtataagagcaggcgttaaccagcgtaacggtggcaataaagcagaggatgaagaagccccacatggtggcggtgctgagtggcagagcggcccaggtttcaatgatggcgcgcgccacaccgtactgttcgatcagatttggaatgttgatgatgtttttatctatcaacagcagagtgttactaccgagtacagtccacaggatccaggtactcgctgtcagccccagcaccatgccgaagcacagttcacgcacagtacgaccacgggagatgcgggcgaggaagatactcatctggatagcataaatcacccaccatgcccagtagaacacggtccagccctgcgggaagccgcctttagcgatgggatcggtatagaacaacatgcgcggcagatacatcagcaacatccccacgctatcggtgaagtagttcatgatgaagctggcaccgctgacaatgaacacccaacccagcatcaggaagctcaggtaactacgcacgtcactggcgatacgtacccctttttgcagaccgcaagcgacgcaaatggcgttgaggataatccagcaggtaatgatgatagcgtccagttgcagggtatgcggaatgccaaacaaccattgcatacactcggtcaccagcggcgtggcaaggcccagactggtacccatcgcgaagatcaaggcgacgagatagaagttgtcgacgatagtgccgaacaaccctttggcgtgtttttcacctaccagcggcaccagtgtgctgctggggcgaatcacttccattttgcggacaaagaagaagtaagcgaaggcgacactaaggaagctgtaagtggcccacggcagaggtccccagtggaacaagctgtaagccagccccaactctttcgcccctgtgctgttcggttctaagccaaacggcggggtggagatgtagtagtagatctcaatgcttccccagaacagtacggcagcagacgtacaggaggcgaacatcataaagatccaactggcggtgctaaattctggcggttcgttacctaaacgctttttggcatacgggccaaacaccagccagaaccaaccgaaaagcatcaccaccatataccattcaaatgcccatccccatacattggtgacgtaactgaatacagcattaataacgacattcgctgcatccagatctctgactgtaagccaacaaagtatgccgacgattattaacggcggaaagaaaaccttcggttctattcccgtttttctcttttcattcttcatgagttaattccactgtgaaaacgaatatttattttgcgttcccgtttgttttatttttgttaacatttaatataattattattaacctcgtggacgcgttaatggctaactcataatgggtattcaataagctgtattctgtgattggtatcacatttttgtttcgggtgaatagagggcgttttttcgttaattttgattaataatcagtttgttatgctctgttgtgagtaaaaaataacatctgactttcaatattggtgatccataaaacaatattgaaaatttctttttgctacgccgtgttttcaatattggtgaggaacttaacaatattgaaagttggatttatctgcgtgtgacattttcaatattggtgattaaagttttatttcaaaattaaagggcgtgatatctgtaattaacaccaccgatatgaacgacgtttccttcatgatttctggagatgcaatgaagattattacttgctataagtgcgtgcctgatgaacaggatattgcggtcaataatgctgatggtagtttagacttcagcaaagccgatgccaaaataagccaatacgatctcaacgctattgaagcggcttgccagctaaagcaacaggcagcagaggcgcaggtgacagccttaagtgtgggcggtaaagccctgaccaacgccaaagggcgtaaagatgtgctaagccgcggcccggatgaactgattgtggtgattgatgaccagttcgagcaggcactgccgcaacaaacggcgagcgcactggctgcagccgcccagaaagcaggctttgatctgatcctctgtggcgatggttcttccgacctttatgcccagcaggttggtctgctggtgggcgaaatcctcaatattccggcagttaacggcgtcagcaaaattatctccctgacggcagataccctcaccgttgagcgcgaactggaagatgaaaccgaaaccttaagcattccgctgcctgcggttgttgctgtttccactgatatcaactccccacaaattcctagcatgaaagccattctcggcgcggcgaaaaagcccgtccaggtatggagcgcggcggatattggttttaacgcagaggcagcctggagtgaacaacaggttgccgcgccgaaacagcgcgaacgtcagcgcatcgtgattgaaggcgacggcgaagaacagatcgccgcatttgctgaaaatcttcgcaaagtcatttaattacaggggatgctatgaacacgttttctcaagtctgggtattcagcgataccccttctcgtctgccggaactgatgaacggtgcgcaggctttagctaatcaaatcaacacctttgtcctcaatgatgccgacggcgcacaggcaatccagctcggcgctaatcatgtctggaaattaaacggcaaaccggacgatcggatgatcgaagattacgccggtgtcatggctgacactattcgccagcacggcgcagacggcctggtgctgctgccaaacacccgtcgcggcaaattactggcggcaaaactgggttatcgccttaaagcggcggtgtctaacgatgccagcaccgtcagcgtacaggacggtaaagcgacagtgaaacacatggtttacggtggtctggcgattggcgaagaacgcattgccacgccgtatgcggtactgaccatcagcagcggcacgttcgatgcggctcagccagacgcgagtcgcactggcgaaacgcacaccgtggagtggcaggctccggctgtggcgattacccgcacggcaacccaggcgcgccagagcaacagcgtcgatctcgacaaagcccgtctggtggtcagcgtcggtcgcggtattggcagcaaagagaacattgcgctggcagaacagctttgcaaggcgataggtgcggagttggcctgttctcgtccggtggcggaaaacgaaaaatggatggagcacgaacgctatgtcggtatctccaacctgatgctgaaacctgaactgtacctggcggtggggatctccgggcagatccagcacatggttggcgctaacgcgagccaaaccattttcgccatcaataaagataaaaatgcgccgatcttccagtacgcggattacggcattgttggcgacgccgtgaagatccttccggcgctgaccgcagctttagcgcgttgatccactctggcagggctgcattttggccctgccgctgacagggagctcttatgtccgaagatatctttgacgccatcatcgtcggtgcagggcttgccggtagcgttgccgcactggtgctcgcccgcgaaggtgcgcaagtgttagttatcgagcgtggcaattccgcaggtgccaagaacgtcaccggcgggcgtctctatgcccacagtctggaacacattattcctggtttcgccgactccgcccccgtagaacgcctgatcacccatgaaaaactcgcgtttatgacggaaaagagtgcgatgactatggactactgcaatggtgacgaaaccagcccatcccagcgttcttactccgttttgcgcagtaaatttgatgcctggctgatggagcaggccgaagaagcgggcgcgcagttaattaccgggatccgcgtcgataacctcgtacagcgcgatggcaaagtcgtcggtgtagaagccgatggcgatgtgattgaagcgaaaacggtgatccttgctgatggggtgaactccatccttgccgaaaaattggggatggcaaaacgcgtcaaaccgacggatgtggcggttggcgtgaaggaactgatcgagttaccgaagagcgttattgaagaccgttttcagttgcagggtaatcagggggcggcttgcctgtttgcgggaagtcccaccgatggcctgatgggcggcggcttcctttataccaatgaaaacaccctgagcctggggctggtttgtggtttgcatcatctgcatgacgcgaaaaaaagcgtgccgcaaatgctggaagatttcaaacagcatccggccgttgcaccgctgatcgcgggcggcaagctggtggaatattccgctcacgtagtgccggaagcaggcatcaacatgctgccggagttggttggtgacggcgtattgattgccggtgatgccgccggaatgtgtatgaacctcggttttaccattcgcggtatggatctggcgattgccgccggggaagccgcagcaaaaaccgtgcttagtgcgatgaaaagcgacgatttcagtaagcaaaaactggcggaatatcgtcagcatcttgagagtggtccgctgcgcgatatgcgtatgtaccagaaactaccggcgttccttgataacccacgcatgtttagcggctacccggagctggcggtgggtgtggcgcgtgacctgttcaccattgatggcagcgcgccggaactgatgcgcaagaaaatcctccgccacggcaagaaagtgggcttcatcaatctaatcaaggatggcatgaaaggagtgaccgttttatgacttctcccgtcaatgtggacgtcaaactgggcgtcaataaattcaatgtcgatgaagagcatccgcacattgttgtgaaggccgatgctgataaacaggcgctggagctgctggtgaaagcgtgccccgcaggtctgtacaagaagcaggatgacggcagtgtgcgcttcgattacgccggatgtctggagtgcggcacctgtcgcattctggggctggggagcgcgctggaacagtgggaatacccgcgcggcacctttggtgtggagttccgttacggctgatgttggtttgatacgtaacgccgcactgactctcattgcaaaaaacaggaataaccatgcaaccgtccagaaactttgacgatctcaaattctcctctattcaccgccgcattttgctgtggggaagcggtggtccgtttctggatggttatgtactggtaatgattggcgtggcgctggagcaactgacgccggcgctgaaactggacgctgactggattggcttgctgggcgcgggaacgctcgccgggctgttcgttggcacaagcctgtttggttatatttccgataaagtcggacggcgcaaaatgttcctcattgatatcatcgccatcggcgtgataagcgtggcgacgatgtttgttagttcccccgtcgaactgttggtgatgcgggtacttatcggcattgtcatcggtgcagattatcccatcgccaccagtatgatcaccgagttctccagtacccgtcagcgggcgttttccatcagctttattgccgcgatgtggtatgtcggcgcgacctgtgccgatctggtcggctactggctttatgatgtggaaggcggctggcgctggatgctgggtagcgcggcgatcccctgtttgttgattttgattggtcgattcgaactgcctgaatctccccgctggttattacgcaaagggcgagtaaaagagtgcgaagagatgatgatcaaactgtttggcgaaccggtggctttcgatgaagagcagccgcagcaaacccgttttcgcgatctgtttaatcgccgccattttccttttgttctgtttgttgccgccatctggacctgccaggtgatcccaatgttcgccatttacacctttggcccgcaaatcgttggtttgttgggattgggggttggcaaaaacgcggcactagggaatgtggtgattagcctgttctttatgctcggctgtattccgccgatgctgtggttaaacactgccggacggcgtccattgttgattggcagctttgccatgatgacgctggcgctggcggttttggggctaatcccggatatggggatctggctggtagtgatggcctttgcggtgtatgcctttttctctggcgggccgggtaatttgcagtggctctatcctaatgaactcttcccgacagatatccgcgcctctgccgtgggcgtgattatgtccttaagtcgtattggcaccattgttagcacctgggcactaccgatctttatcaataattacggtatcagtaacacgatgctaatgggggcgggtatcagcctgtttggcttgttgatttccgtagcgtttgccccggagactcgagggatgagtctggcgcagaccagcaatatgacgatccgcgggcagagaatggggtaaattgttcagatttctctcttttctgaatcaatattattgactataagccgcgtgaatatatgactacactttgtgggaaaacaaaggcgtaatcacgcgggctacctatgattcttataatttatgcgcatccgtatccgcatcattcccatgcgaataaacggatgcttgaacaggcaaggacgctggaaggcgtcgaaattcgctctctttatcaactctatcctgacttcaatatcgatattgccgccgagcaggaggcgctgtctcgcgccgatctgatcgtctggcagcatccgatgcagtggtacagcattcctccgctcctcaaactttggatcgataaagttttctcccacggctgggcttacggtcatggcggcacggcgctgcatggcaaacatttgctgtgggcggtgacgaccggcggcggggaaagccattttgaaattggtgcgcatccgggctttgatgtgctgagccagccgctacaggcgacggcaatctactgcgggctgaactggctgccaccgtttgccatgcactgcacctttatttgtgacgacgaaaccctcgaagggcaggcgcgtcactataagcaacgtctgctggaatggcaggaggcccatcatggataattaaggaatggcaggaggcccatcatggatagccatacgctgattcaggcgctgatttatctcggtagcgcagcgctgattgtacccattgcggtacgtcttggtctgggaagcgtacttggctacctgatcgccggctgcattattggcccgtgggggctgcgactggtgaccgatgccgaatctattctgcactttgccgagattggggtggtgctgatgctgtttattatcggcctcgaactcgatccacaaaggctgtggaagctgcgtgcggcagtgttcggctgtggcgcattgcagatggtgatttgcggcggcctgctggggctgttctgcatgttacttgggctgcgctggcaggtcgcggaattgatcggcatgacgctggcgctctcctctacggcgattgccatgcaggcgatgaatgaacgcaatctgatggtgacgcaaatgggtcgcagtgcctttgcggtgctgctgttccaggatatcgcggcgatcccgctggtggcgatgattccgctactggcaacgagcagtgccagcacgacgatgggcgcatttgctctcagcgcgttaaaagtggcgggtgcgctggtgctggtggtattgctggggcgctatgtcacgcgtccggcgctgcgttttgtagcccgctctggcttgcgggaagtgtttagtgccgtggcgttattcctcgtgtttggctttggtttgctgctggaagaggtcggcttgagcatggcgatgggcgcgtttctggcgggcgtactgctggcaagcagcgaataccgtcatgcgctggagagcgatatcgaaccatttaaaggtttgctgttggggctgtttttcatcggtgttggcatgagcatagactttggcacgctgcttgaaaacccattgcgcattgtcattttgctgctcggtttcctcatcatcaaaatcgccatgctgtggctgattgcccgaccgttgcaagtgccaaataaacagcgtcgttggtttgcggtgttgttagggcagggcagtgagtttgcctttgtggtatttggcgcggcgcagatggcgaatgtgctggagccggagtgggcgaaaagcctgaccctggcggtggcgctgagcatggcagcaacgccgattctgctggtgatcctcaatcgccttgagcaatcttctactgaggaagcgcgtgaagccgatgagatcgacgaagaacagccgcgcgtgattatcgccggattcggtcgttttgggcagattaccggacgtttactgctctccagcggggtgaaaatggtggtactcgatcacgatccggaccatatcgaaaccttgcgtaaatttggtatgaaagtgttttatggcgatgccacgcggatggatttactggaatctgccggagcggcgaaagcggaagtgctgattaacgccatcgacgatccgcaaaccaacctgcaactgacagagatggtgaaagaacatttcccgcatttgcagattattgcccgcgcccgcgatgtcgaccactacattcgtttgcgtcaggcaggcgttgaaaagccggagcgtgaaaccttcgaaggtgcgctgaaaaccgggcgtctggcactggaaagtttaggtctggggccgtatgaagcgcgagaacgtgccgatgtgttccgccgctttaatattcagatggtggaagagatggcaatggttgagaacgacaccaaagcccgcgcggcggtctataaacgcaccagcgcgatgttaagtgagatcattaccgaggaccgcgaacatctgagtttaattcaacgacatggctggcagggaaccgaagaaggtaaacataccggcaacatggcggatgaaccggaaacgaaacccagttcctaataaagagtgacgtaaatcacactttacagctaactgtttgtttttgtttcattgtaatgcggcgagtccagggagagagcgtggactcgccagcagaatataaaattttcctcaacatcatcctcgcaccagtcgacgacggtttacgctttacgtatagtggcgacaattttttttatcgggaaatctcaatgatcagtctgattgcggcgttagcggtagatcgcgttatcggcatggaaaacgccatgccgtggaacctgcctgccgatctcgcctggtttaaacgcaacaccttaaataaacccgtgattatgggccgccatacctgggaaagtatcggtcgtccgttgccaggacgcaaaaatattatcctcagcagtcaaccgggtacggacgatcgcgtaacgtgggtgaagagcgtggatgaagccatcgcggcgtgtggtgacgtaccagaaatcatggtgattggcggcggtcgcgtttatgaacagttcttgccaaaagcgcaaaaactgtatctgacgcatatcgacgcagaagtggaaggcgacacccatttcccggattacgagccggatgactgggaaagcgtattcagcgaattccacgatgctgatgcgcagaactctcacagctattgctttgagattctggagcggcggtaattttgtatagaatttacggctagcgccggatgcgacgccggtcgcgtcttatccggccttcctatatcaggctgtgtttaagacgccgccgcttcgcccaaatccttatgccggttgctcggctggacaaaatactgtttatcttcccagcgcaggcaggttaatgtaccaccccagcagcagccggtatccagcgcgtatataccttccggcgtacctttgccctccaggcttgcccagtgaccaaaggcgatgctgtattcttcagcgacagggccaggaatcgcaaaccacggtttcagtggggcaggggcctcttccgggctttctttgctgtacatatccagttgaccgttcgggaagcaaaaacgcatacgggtaaaagcgttggtgataaaacgcagtcttcccagcccccgcaattccggactccagttatttggcatatcgccgtacatggcatcaagaaagaagggataggagtcactgcttagcaccgcttctacatcgcgtgcgcactctttggcggtctgcagatcccactgcggcgtgatccctgcgtgggccatcaccagctttttctcttcgtcgatttgcagcagaggctggcgccgcagccagttaagcagctcgtcggcatccggcgcttccagcagcggtgtcaggcgatctttcggtttattgcggctgatcccggcaaataccgccagcagatgcagatcgtgattgcccagcaccagacgtacgctgtcgcctaaggatttcacatagcgcagaacatccaggctacccggcccgcgcgcgaccagatcgcccgtcagccagagggtatctttcccaggggtaaattctactttatgcagcaatgcgatcagttcatcgtaacaaccatgaacgtcgccaataaggtatgtcgccatattcttttaatgaatgagtgtgggaacggcgagtcggaatacgggaatgtcgatgctgaaagggacgccattttcatcgatcatttcgtagtgaccctgcatggtgcccagcggggtttcaatgattgcaccgctggtgtactggtactcttcgccaggcgcgataagtggctggacgccaaccactccttcgccctggacttcggtttcacggccattgccattggtgatcagccagtaacgccccaacaactgcactggcgctcgccccagattgcgtatggttacggtataagcaaaaacgtaacgttcattatcaggactagattgagcctcaatgtagacgctttgaacctgaatacacactcgggggctattgatcatcgttaactctcctgcaaaggcgcgttctccgccagatagttcgccatctggcaatattgcgcgacagagatattttccgctcgcatcgccgggtcgatccccattcccgttaacacctcgacgctaaacaggttgccgaggctgttacgaatggttttacgacgctggttaaaggcttcggtggtgatgcggctcaacacacgaacatctttaaccgggtgaggcatcgttgcatgaggaaccaggcgcacgacggcggaatccactttgggtggtggtgtaaaggcactcggcggtacttccagtaccgggatcacattgcaatagtattgcgccatgacgcttaatcgaccatacgctttgctgttcggtcctgcaaccagacgattcaccacctctttttgcaacataaagtgcatgtcggcaatggcatcagtatagctaaacagatggaacatcaacggcgtggagatgttataaggcaggttgccgaaaacacgcagcggctgacccattttctcggccagttcaccaaagttaaaggtcatcgcatcctgctgataaatcgtcagtttcgggcctaagaatggatgcgtttgcagacgtgccgccagatcgcggtcaagttcgatgaccgtcagctggtccagacgttcgccgaccggttcggtcaatgccgccagaccggggccgatttcgaccatcgcctggcccttttgcgggttaatggcagacacaatactgtcgatcacgaactgatcgttgagaaagttttgcccgaagcgtttacgggctaagtggccctggtggactcgattattcattgggtgttaacaatcattttgatggcgagattaagcgccgtaataaaactgccggcatcggctttgccacgtcccgccagttcaagcgcggtgccgtggtccacacttgtgcgaataaagggcaggcccagcgtaatgttcacaccgcgcccgaagccctggtattttagcacgggaagaccctgatcgtggtacatcgccagcacggcgtcggcgttatcaagatatttcggctgaaacagggtatcggcaggcagcggcccgttgagtttcatcccctgcgcccgcagctcattgagcaccggaataatggtgtctatctcttccgtacccatatgaccgccttcgcccgcgtgcggattcagcccgcagaccagaatgcgcggttcggcaataccaaatttggtccgcaaatcgtgatgcaaaatagcaatcacttcgtgcaaaagtgcaggggtgatagcgtctgcgatatcgcgcagcggtaaatgcgtcgttgccagcgccacgcgaagttcttcggtcgccagcatcatcaccacctttttcgcctggctacgctcttcgaaaaactcggtatgaccggtaaaaggaatgccagcgtcgttaataacgcctttatgcaccggacctgtgatcagcgcggcaaattcgccgttcagacaaccatcgcacgctcgcgccagcgtttccaccacataatgcccattttcaaccgctaactgccccgcagtgacaggtgcacgtagcgcgacaggaagtagcgttaatgtgcccgcagtttgcggttgtgcaggggagttgggggaataagggcggagggtgagcggcaaaccgagcatcgctgcccggttggtaaggagagtggcatcggcacaaacaaccagttcgaccggccactcacgctgtgcaagctggacaactaagtccgggccaatcccggcgggctcgccgggagtgatcacaacacgttgggttttaaccattagttgctcaggattttaacgtaggcgctggcacgttgttcctgcatccagcttgctgcttcttcgctgaacttacggttcatcagcatgcggtatgcacgatctttctgcgcagcgtcggttttatcgacattacgggtatccagcagttcgattaaatgccagccgaaactagagtgaaccggtgcactcatttgacctttgttcaggcgagtcagggcgtcacggaaggccggatcgaaaatatctggtgtagcccagccgagatcgccgccctggttagcagagcctggatcctgagagaactctttcgctgcggcagcaaaagtcgttttaccactcttgatatcagcagcaatctgttccagtttcacacgggcctgttcgtcagtcatgatcgggctcggtttcagcagaatatggcgagcatgaacttcggtcacgctgatatttttgctttcgccgcgcaggtcgttaactttcagaatatggaagccaacgccggaacgaatcgggccaacaatgtcgcctttcttcgcggtgcttaatgcctgggcgaagatcccgggcaactcctgaatacggccccagcccatctggccgccgttcagcgcctgctggtcggcagaatgagcaatcgccagcttaccgaaatcagcgccgttacgcgcctgatcgacaatggcgcgcgcctggctttccgcttcgttcacctgatcagaggtcgggttttccggcagcgggatcaggatgtggctcaggttcagctcagtgctggcgtcgttttggttacccacctgctgcgccagggattcgacttcctgcggcaggatggtgatgcgacgacgcacctcgttgttacgcacttcagagataatcatctctttgcggatctggttacgataggtgttgtagttcagtccatcgtaagccagacggctgcgcatctgatccagcgtcatgttgttctgtttcgcgatgttagcaatcgcctgatccagctgctcatcggagattttcactcccattttctgccccatctgcaggatgatttgatccatgatcaaacgttccatgatttggtggcgcagcgtcgcgtcatcaggaagttgctgccttgcctgagcagcgttcagttttacgctctgcattaatccatcaacgtcgctttccagcacgacgccgttattgacgacggctgcgactttatcgactacctggggggcagcgaaactggtattcgcgatcatggcgataccgagaagcagcgttttccagttcttcatactttttccatttcaattaaccgcactgcggattacgtggtaaatcaacaaatcacaaagtgttttgatacggcagaatgttgctacgcagcatctcttgcgtacccagaccgtagttggagctcaggccgcgaagttcgatgttaaagccgattgcgttgtcatataccgcatgttgtttatcgttatcccaaccgttcagcttccgctcgtaaccgacgcgaattgcatagcagcaggagctgtattgcacacctaacatagagtcggcttgcttgttagcattggtgtcgtagtagtaggccccaacaatggaccaacgatcggcaattggccagctggcgacagcacctacctggctaataccattcttatattgctcagcagtggaatagtacttaggcagcgtagcctgaatatattccgggctggcgtaacggtaattcagctgtaccagacggtcttcatcccgacggtattcaatgctggagttactggtcgctacgttatccagacgtgtatcgtactgaatcccgccacgcaatccccaacgctcggagatacgccagtaagtatcgcctgcccacaccagactacccgttttgtcgtcattctcccatgttatgttgtcatcgccagtgcgagactccgtgaaatagtagatttgaccaacggaaatattaaaacgttcaacggcagcatcatcatatatgcgagatgtgacaccggtcgtcacctggttagcggaggcaatacggtcaagaccgccgtaagtccggtcccggaacaggccagagtagtcagattgcagcagagagctgtcgtagttatagatgtcgctctgatcgcgatacggcacgtacaaatactgcgcgcgcggttccagcgtttgggtataacccggagccagcatttccatatcgcgttcaaagaccattttgccgtcaactttgaattgcggcattacgcggttaacggattcgtccagcttggtcgtgtttctggagttataccagtcaagattggtttgctgataatgggttgccagcaacttcgcttcggtattgatgctgccccagttattagagagcggcaaattgatggtcggttccaggtgaacacgggttgcttcaggcatgtcgtctctggtgttaacaaagtgcactgcctggccgtaaatacgcgtatcaaacggaccaacatcattctggtagtaattaacgtctaactgcggctctgcgctgtagctactggtgttctgttcgctgaaaacctggaactgcttggtactaacggtggcattgaagttttgcaccgcatagccaacgctgaatttttgcgttgcgtagccgtcagtactggaaccgtacttgttatcgaaatcattgaagtagctaggatcgctgaccttggtgtagtcgacgttgaaacgccacacctgatccatgaccccggagtggttccagtagaataaccaacgacgactactgtcatcgttcgggtgttcatcttcatagactttatcactaggcagatagtccagttccatcaagccagcgcccgcctgggagaggtagcggaattcgttctcccacatgatgttgccacgacgatgcatataatgcggcgtgatggtggcatccatatttggcgcgatgttccagtaatatggcaggtagaactcaaagtagttggtggtggtgtacttggcgttcgggatcaagaaaccagagcgacgtttgtcacccaccggcaactgcaaataggggctataaaagatcggtaccggacccaccttaaagcgggcgttccagatctccgcaacttgttcttcgcggtcatgaataatttcgctacctaccacgctccaggtgtcagaacccggcagacaggaggtaaagctaccgttatccagaatggtatagcggttttcgccacgttgtttcatcaggtccgctttaccgcgaccctggcgacccaccatctggtaatcaccttcccagacgttggtatctttggtgttcagattcgcccagcctttcggccctttgaggatcacctggttatcgtcgtaatggacattaccgagcgcatcaacggtacgtaccggctccggttgtcctggtgcctctttttgatggagctgcacttcgtcggcctgcagacggctgttaccctgcatgatatccacgctgccagtaaacacggcgtcatccgggtagtcccctttcgcgtggtcagcattgatagtcacgggtaagtcattggtatcgccctgtaccagaggacggtcatagcttggcacgcccaacatgcactgactggcgaggtcggctgccagtccctgttgactataaagggcggtggcaatcatggtggccaggagagtggggatacgttttttcatacgttgattttattgttccatcatcggtaacgttgcgcgtgacaaacggtcagagactaacgtactcgtcatctctacgctagtgttaatcctgtccgaatagcgtcagtggtgttaggcacggcattgaatgacaggtatgataatgcaaattataggcgatgtcccacaattgaccgcagccggaaaacggtaaaagcacctttatattgtgggagatagccctgatatccgtgtgtcgatttggggaatatatgcagtattggggaaaaatcattggcgtggccgtggccttactgatgggcggcggcttttggggcgtagtgttaggcctgttaattggccatatgtttgataaagcccgtagccgtaaaatggcgtggttcgccaaccagcgtgagcgtcaggcgctgttttttgccaccacttttgaagtgatggggcatttaaccaaatccaaaggtcgcgtcacggaggctgatattcatatcgccagccagttgatggaccgaatgaatcttcatggcgcttcccgtactgcggcgcaaaatgcgttccgggtgggaaaaagtgacaattacccgctgcgcgaaaagatgcgccagtttcgcagtgtctgctttggtcgttttgacttaattcgtatgtttctggagatccagattcaggcggcgtttgctgatggtagtctgcacccgaatgaacgggcggtgctgtatgtcattgcagaagaattagggatctcccgcgctcagtttgaccagtttttgcgcatgatgcagggcggtgcacagtttggcggcggttatcagcagcaaactggcggtggtaactggcagcaagcgcagcgtggcccaacgctggaagatgcctgtaatgtgctgggcgtgaagccgacggatgatgcgaccaccatcaaacgtgcctaccgtaagctgatgagtgaacaccatcccgataagctggtggcgaaaggtttgccgcctgagatgatggagatggcgaagcagaaagcgcaggaaattcagcaggcatatgagctgataaagcagcagaaagggtttaaatgaccctgtaaatgatgctgagtaactgcccacgattaaaggtggccgccctggcggtcacttctttgagaaaaggcgtttactcagaatggtggacaggctcaatgcacgatttacgggaggggttctgtaggttttatcgcgttgaccctgcttaaggttgagagctttacgacgagcggaattatatttttacgtcttaaaaataaaaaacacatacctgaatgagcgatttttgaaagtatatttattcagaacgcgcatcatgagtttttaactcaatgcgaggctattaccatgaaagtaagtgttccaggcatgccggttacacttttaaatatgagcaagaacgatatttataagatggtgagcggggacaagatggacgtgaagatgaatatctttcaacgcttgtgggagacgttacgccatctgttctggagtgataaacagactgaggcttataaacttctgttcaatttcgtgaataaccagactggcaacatcaacgccagtgaatactttactggggctatcaacgagaatgagagagaaaagtttatcaatagcctggaattattcaataaacttaaaacatgcgcaaaaaatccggatgagttggtcgcaaagggcaatatgcgctgggtcgcccagaccttcggggatatcgagttaagtgtcactttttcattgaaaagaataagatatgtactcagacgttgcagctgcataagggccaaggtaacttgggcgttgatcttagaaaggcttaccttcccggcgttgacatgagggattgttaccttggtaaaaaaacaatgaaaggtagcaatgatatcctttatgagagacctgggtggaatgctaacctgggcgtgctaccccggacggtgctaccccggacggtgctaacccggacggtgctaacctggacggtgctaccgtgaacggtgctacctccttatatgatgaggtaattattattaataaaatcccccccaaaaaaattgatactaaaggagttgctactgaagaagttgctactaaaaaagtactgctgaacaaattactgacaacgcaattattgaatgagccagaataagctaaggttgaaggggctggaacgccccttcaaccttagcagtagcgtgggatgatttcacaattagaaagacctgcatgatgagctagagaagaggctagtgacgcaaggcgtcgtgcaggacacggatcaccgagatgggcatcgccaaccagactgctaattagcccatgaataacaatcagaaaggaccataacagacccgttaaaatgaaatataagagacggtcaacgggtgaagaaaaagttcaaaaattcgctgtggagcaggaagggaattaccgaatggaaagcgtagccacacgcaacaactgaaagcagtttggcagaaacaaaaaatccccggactcggggatttatgtacaagaggcagcccttaggatgagggtataaacgtacaggaaaggttaaaaatccgctggcgctttaaacgtcatactattgccatacgccggatgggtaatcgtcaacatctctgcatgtagcaacaaacgtggtgccatcgctctcgcttctggacttgcataaaaacgatcgccgagaatcggatgacccagcgccagcatatgcacacgcaattgatggctacgcccggtaatcggttttaacaccactcttgccgtgttatccgccgcatactccaccacttcatattccgtctgcgcaggtttacccgtttcgtaacagactttctgtttcgggcggtttggccagtcgcaaatcagcggcagatccaccagaccttctgcgggggatggatgcccccagacgcgggccacatactgctttttcggctcgcgctcgcggaactggcgttttaactcccgctccgcggctttggtcagcgccactacaatcacgccgctggtagccatatccagacgatgcacgctttctgcctgcggataatcacgctgaatgcgcgtcatcacgctgtctttgtgctcttccagacgacccggcacactcaacaaaccgctcggcttgttgaccaccataatatggtcatcctgatacaggataaccaaccagggttcctgcggtggattgtagttttccatccccattttcggctccgttactgatgcgttacaacgatcaaacgcagggcatccagacgccaacctgcctgatccaggctttccattacctgctgacggttgctctcaatggcggtcagttcgtcgtcacgaatgttcgggttcactgcacgcagagcttccagacgagacagctcggcagacagtttttcgtcggcttcgttacgcgctgcatcaatcaatgcacgggcagatttctcgatctgcgattcacccagttgaaggatagcgtgaacatcctgctgcacggcgttaaccagtttgctgccggtgtgacggttaaccgcgttaagctggcggttaaaggtttcaaactctacctgcgccgccaggttgttgccgtttttatccagcagcatacgtaccggcgtcggtggcaggaagcggttgagctgcaactgcttcggagcctgggcttcaaccacataaatcagttccaccaacagcgtacctaccggcaacgctttgttttttaacagactaatcgtgctgctaccggtatcgccagaaaggatcagatccagaccgttgcggatcagcggatgctcccaggtaataaactgtgcatcttcacgcgccagcgccacttcacgatcaaaggtgatggtgatgccatcttcgctcaggccagggaagtccggcaccagcatatgatcggacggcgtcagcacgatcatgttgtcgccgcgatcgtcctgattgataccgataatatcgaacaggttcatggcgaaggcgatcaggttggtatcgtcatcctgctcttcaatgctttctgccagtgcctgggctttttcgccaccgttggagtggatttccagcaggcggtcacgaccctgttccagctgtgctttcagcgtttcatgttgctcgcggcagtttttgatcagatcgtcaaagccttcggtttgatccggactagccagatagttaatcagatcgttgtatacgctatcgtaaatagtgcgtccggtcgggcaggtgtgctcaaatgcatccagaccttcgtgataccagcgcaccagcacgctctgagcggttttctccagataaggcacatggatctgaatatcgtgcgcctggccgatacgatccagacgaccaatacgctgctccagtagatccgggttgaatggcaggtcaaacatcaccatgtggctggcgaactggaagttacgtccttcagaaccgatttcactgcacagcagtacctgtgcgccggtgtcttcttcggcaaaccaggcggcagcgcggtcacgttcgataatgctcataccttcgtggaacaccgcagcgcgaataccttcacgttcgcgcagtacctgctccagttgcagcgcagtggcagctttggcgcagatcaccagcactttctgagagcgatggctggtcaggtagcccatcagccactcaacgcgcggatcgaagttccaccaggtggcgttatcaccttcaaattcctgataaatacgctccgggtagagcatatcgcgagcacgatcttccgcacttttacgtgcgcccataatgccggagactttaatagccgtctgatactgcgtcggtagcggcagcttaatggtgtgcagctcgcgtttcgggaatcctttcacaccgttacgcgtgttacggaacagcacgcggctggtgccgtggcgatccatcagcatgctaaccagctcctgacgggcgctctgggcatcttcgctgtcgctgtttgctgcctgcaacagcggctcgatatcctgctcgccgatcatctcgccgagcatgttcagttcgtcattgctcagtttgttacctgccagcagcatggcaacggcgtccgcaaccggacgataatttttctgctcttcaacgaactgcgcaaaatcgtggaaacggttcgggtccagcagacgcagacgggcgaagtggctttccatccccagctgttccggggtcgcggtcagcagcagaacgcccggcacgtgctctgccagttgttcaatggcctgatattcacggcttggcgcatcttcgctccacaccaggtgatgcgcttcatcgaccaccagcaggtcccattcggcttcacagagatgttccaggcgctgtttgctacgacgggcaaaatccaggctgcaaatcaccagctgttcggtgtcaaacgggttgtaagcatcgtgctgagcttcggcataacgctcatcatcaaatagcgcaaagcgcaggttgaaacggcgcagcatttctaccagccactgatgctgtaaggtttccgggacgataattagcacacgttcagcagcgccagagagcagttgctgatgcaggatcatcccggcttcaatggttttccctaaacccacttcgtcagccagcaggacgcgcggcgcgtggcggcgaccaacatcatgagcgatgttgagctgatgcgggatcaggctggtacgctgaccgcgcaggccgctgtacggcatacggaactgttcgctggaatatttacgcgcgcgataacgcagcgcaaagcggtccatacggtcaatctgcccggcaaacagacggtcctgcggtttgctgaacaccagtttgctatcaaggaaaacttcacgcagggctacgccggactcttcagtatccaggcgagtaccgatataggtcagcaagccattttcttcttttacttcttcgacttgcatctgccagccgtcatggctggtaatggtatcaccagggttgaacatcacgcgggtcacgggggaatcactgcgtgcgtacagacggttttcaccagtagatgggaaaagtaaagtgacagttcgcgcatccaccgcgacaacggttccaagtcccaattcgctttctgtatcgctgatccagcgttgaccaagtgtaaaaggcatatgtgttcggctctatatctttaattgcaggcaataaccacccgctaccgtgcttatgaggtagtggtgttattcaggtccaggaatggaaagggcgctatggtactggatggcaaagcattcgtcacgcatcaaaatggtatctggcgaactcttttttttgctcaaaatagcccaagttgcccggtcataagtgtagcaaaattatcctcaataaaagggagtattccctccgccacgggttgtagctggcgggtcagatagtgttcgtaatccagtggactacgttggtagtccagcggctccgggccgttggtggtccatacgtacttaatggtgccgcgattctgatattgcaaggggcgaccacgcttttggttttcttcatcggcaaggcgagcggcgcgtacatgaggcggcacattacgctgatactcgctcagcggacggcgaaggcgtttacggtaaaccagtcgcgcatccagttcacccgccatcagtttgtcgatggtttcgcgtacatattcctgatatggctcgttgcggaagatgcgcaggtatagctcctgctgaaactgctgggccagcggcgtccagtcggtgcgcacggtttccagccctttaaacaccatccgctgcttgtcgccctcctgaatcagtccggcataacgctttttactgccggtatcggctccgcgaatggttggcatcagaaaacggcagaaatgggtttcatactccagttctaatgcgctggtcagccgttgtttttgcagcgtttccgcccaccaggcgttaacgtgctgcaccagtgcacgaccgattttcgccgcttcttcttcgctatgtgcgcctttcagccagacaaacgtactgtcggtatcgccgtagataacgtcgtagccctgtgcttcaatcaacgctttggtttgccgcatgatctgatgaccacgcatggtgatgctgcttgccagccgcggatcgaagaagcggcaggcggtggtgccgagcacgccataaaaggcattcatgatgattttcagcgcctggctcagcggtttgttaccctggcgtttggcttcatcgcgcccgtgccagatgttagtcacaatctccggcaggcaatgtttttctcggctgaaccaggcatcgagaaaaccttcggtactgtgctctggatcaggctgcgccatgccttccaccagcccgacgggatcaatcagaaaggtgcggatgatgctcgggtacaggcttttatagtccagcaccagcacactatcataaagccctggccgactatccatcacgtagccgccagggctggcgtgcggcggcacttcgccgagattaggcgcgacataaccagcgcgatgcattcgcggaaaatagagatgaccaaatgccgccacgctaccgccgtgtcggtccaccggcaggccgttcaccgttgcccgttcgagtaaaaatggcatgatttcagttttgtggaagatctgcgtcaccagctcgcaatctttcaggttataagttgccagcgcaggtttatcttcggcgaaacggcggtcaatttcgtccattcgatcccacgggttatcgatagattttccttcgcctaatagctcctgagcgacagtttccaggctgaaactagagaaattccagaacgcggatttcagcgcctcgataccgtcgataattagccgacctttagcctgggcaaaaaagacgccgtttttaaagccgtgctcgcgccactccagctcgctattatcgcgcccaagacgcagcggaagacggtaacgctcggcatgtttttgcagcattcgcagatcgaactgcaccacgttccaaccgatgatcacatcaggatcgtagttggcaaaccaggcgttgagtttttccagcaactgcgggcggctggcgacgtattccagttcgaaatcaaggctggaggcgtcgccattctccggccccagcatataaacgatgcgctgcccgcagccttccaggccgatgcagtacagctcaccgtggcgggtggtttcaatatctatagaaacccacttgagcggcggacgatagtcgggatgcggtttcagacgggcattaacgatagtgccattgtgcatatcaccctcgacccacaccggactggtgataaaccgctccatcagatagcgttctggcggacgcacatcggcctcgtagacggtaacgccaccttcacgcaggcgcttttcgtaattcatcaattggcgatgggcgcgacagtaaaggccatacaccggctggcggtgaaaatcctttaacgccagcggtgtcaggcgaaagccttgttcaccctgcaaaatatgctgagcgcggggaacctgatcggcgggaataaacgccacggactcttgcggtgcaagcgtaacctgcaacggcccgttgtccgtcgccagccagaaggagacttctgtcccttgcggggtgtcccgccagtgtcgggttaagataaaacctgcctgcgccacgctgaaaatccatcaaaaaaccaggcttgagtatagcctggtttcgtttgattggctgtggttttatacagtcattactgcccgtaatatgccttcgcgccatgcttacgcagatagtgtttatccagcagcgtttgctgcatatccggtaactgcggcgctaactgacggcagaatatccccatataagcgacctcttccagcacgatggcgttatgcaccgcatcttcggcatttttgccccatgcaaacgggccgtgggaatggaccagaacgccgggcatttgcgctgcatcgataccctgtttttcaaaggtttctacgatgacgttaccggtttcccactcatattcgccgttgatttctgcgtcggtcattttgcgggtgcagggaatggtgccgtagaaatagtcggcgtgggtggtgccggttgctggaatgctctgacccgcctgcgcccagatggtggcgtggcggctgtgcgtatgcacaatgccgccaatggaggggaatgcctgatagagcagccggtgagttggcgtgtcggaggagggctttttcgtaccttcaaccacttcaccggtttcgatgctaaccacgaccatatcgtcagcggtcatgacgctgtaatcgacgccggaaggtttgatcacaaagacgccgcgctcgcgatcaacggcgctgacgttgccccatgtgagcgtgaccaggttgtgttttggcagcgccaggttggcttctaatacctggcgtttgagatcttctaacatgttgactccttcgtgccggatgcgctttgcttatccggcctacaaaatcgcagcgtgtaggcctgataagacgcgccagcgtcgcatcaggcgttgaatgccggatgcgctttgcttatccggcctacaaaatcgcagcgcgtaggcctgataagacgcgccagcgtcgcatcaggcgttgaatgccggatgcgctttgcttatccggcctacaaaatcgcagcgtgtaggccagataagacgcgtcagcgtcgcatcaggcgttacataccggatgcggctacttagcgacgaaacccgtaatacacttcgttccagcgcagcgcgtctttaaacgctggcaggcgtgtgtcgttatcaatcaccgtgatttcaatgtcgtgcatctcggcgaattggcgcatatcgttgaggttcagtgcatggctgaagacggtatggtgcgcgccaccagcgaggatccacgcttcggaagcagttggcagatccggttgcgctttccacagcgcattcgccaccggcagtttcggcagggagtgcggtgttttcaccgtgtcgatgcagttaaccagtagacggtaacgatcgccgagatcaatcaagctggcgacaatcgctgggccggtttgggtattgaagatcaggcgggcaggatcgtccttaccaccaataccgagatgctgaacgtcgaggatcggtttctcttctgcggcgatgctcgggcagacttccagcatatgggagccgagcaccaggtcattacctttctcgaagtgataggtgtagtcctccataaaggaggtgccgccctgcagaccggtactcatcaccttcatgatgcgaagcagggcggcagttttccagtcgccttcgcccgcaaagccgtaaccctgctgcatcagacgctgtacggccagaccaggaagctgtttcagaccgtgcaaatcttcaaaggtggtggtgaacgcgtggaagccaccttgttccaggaaacgcttcatccccagctcaatacgcgccgcttccagcacgttctgtcgttttttgccgtggatttgtgtggcaggcgtcatggtgtagcagctttcgtactcatcgaccagcgcgttaacatcgccgtcgctgatggagttcaccacctgcaccagatcgccaaccgcccaggtattgacggagaaaccgaacttgatctgtgcggcaactttatcgccatcggtgaccgccacttcacgcatgttatcgccaaatcggcagactttcagatgacgggtatcctgtttagagaccgcctgacgcatccaggagccgatacgctcatgggcttgtttatcctgccagtgaccggtaaccacggcatgttgctgacgcatacgcgcgccaatgaagccgaactcgcgaccgccatgtgcagtctggttcaggttcataaagtccatatcgatactgtcccacggcagcgccgcgttgaactgggtgtggaattgcagcaacggtttgttgagcatggtcaggccgttgatccacattttggccggggagaaggtgtgcagccacaccaccagaccagcgcaacgatcgtcgtaattcgcgtcgcggcaaatagcggtgatttcatccggcgtggtgcccagcggtttcaacaccagtttgcagggcagtttcgcttccgtattcagcgcattaacgacgtgctcggcatgttgggtgacctgacgcagggtttccgggccatacagatgctggctgccaatgacaaaccacacttcataattatcaaaaatcgtcattatcgtgtccttatagagtcgcaacggcctgggcagcctgtgccggggcggaagttggaagatagtgttgttcggcgctcatcgcccattgctgatagcggcgataaagctgttcaaagcgttgtgcctgctcgctgcacggttgcagggttttctctaccgcactggccattttttgctgagcacttgggatgtctgcgtgcactttcgcggcgacggcagcaaaaatcgccgcaccgagcgcacagcactggtcagaggcaacaatttgcagcgggcgattcagcacgtcgcagcaggcctgcataatgacctggtttttccgcgcgatgccgcccagtgccatcacgttattaacggcgatcccctgatcggtaaagcactccatgattgcgcgtgcgccaaaggcggtggcagcaatcaaaccgccgaacagcagcggagcgtcggtagcgaggttaagatcggtaatcacccctttcaggcgttggttagcgttcggtgtgcggcggccgttaaaccagtcgagcaccaccggcaggtgatccagagacggatttttggcccatgcttcggtcagcgccggaagcagttgtttctggctggcgttgatttgcgttttcagttccggatgctgggcggcaagctgttccagcggccagccgagtacgcgaccaaaccaggcgtagatatcaccaaacgcgctttggcctgcttccagaccgataaatccaggcaccacgctgccatcaacctgaccgcaaatacctttaactgcccgctcgccaacgctctgtttgtcggcaatcagaatgtcgcaggtggaagtaccgataacttttaccagtgcgttaggctgtgcgcctgcgccaactgcgcccatatggcagtcaaacgcgccgccggaaatcaccacgctttcaggcaggccgagacgctgcgcccattccgggcataaggtgcccaccggaatatcggcagtccaagtgtcagtgaacagcggggaaggcaaatggcgattgaggatcgggtccagctcatcaaagaaactggctggcggcaggccgccccagctttcgtgccacagagatttatgcccggcgctgcaacgtccgcgacgaatatcctgcgggcgggtggtaccggaaagcagagctggcacccagtcgcacagctcaatccagcttgcggcagattgcgccacggcgctgtcctggcgagtcacatgcaggatttttgcccagaaccattcgctggaataaataccaccaatgtagcgggagtagtcaacgttgcccggcgcgtggcacaaacgggtaatctcttccgcttcttcaaccgcagtgtggtctttccacaatacgaacatcgcgttcgggttttcggcaaactccgggcgcagcgccagcacgtttccgtcggcatcaatcggtgcgggcgtgctgccggtactgtcaacgccaatcccgaccacagctgcgcgctgttcgacgctaagctctgcaagcacggttttcagtgccgcttccatactctcaatgtagtcacgcggatgatgacggaactggttattcggggcatcacaaaattgccctttctgccaacggggataccactctacgctggtggcgatctcttcaccggtagcgcagtccaccgccaaagctcgcacagaatcactgccaaaatcgaggccaattgcaatcgccatcgtttcactccatccaaaaaaacgggtatggagaaacagtagagagttgcgataaaaagcgtcaggtaggatccgctaatcttatggataaaaatgctatggcatagcaaagtgtgacgccgtgcaaataatcaatgtggacttttctgccgtgattatagacacttttgttacgcgtttttgtcatggctttggtcccgctttgttacagaatgcttttaataagcggggttaccggttgggttagcgagaagagccagtaaaagacgcagtgacggcaatgtctgatgcaatatggacaattggtttcttctctgaatggtgggagtatgaaaagtatggctgaagcgcaaaatgatcccctgctgccgggatacagctttaacgcccatctggtggcgggtttaacgccgattgaggccaacggttatctcgatttttttatcgaccgaccgctgggaatgaaaggttatattctcaatctcaccattcgcggtcagggggtggtgaaaaatcagggacgagaatttgtctgccgaccgggtgatattttgctgttcccgccaggagagattcatcactacggtcgtcatccggaggctcgcgaatggtatcaccagtgggtttactttcgtccgcgcgcctactggcatgaatggcttaactggccgagtatatttgccaatacgggtttctttcgcccggatgaagcgcaccagccgcatttcagcgacctgtttgggcaaatcattaacgccgggcaaggggaagggcgctatagcgagctgctggcgataaatctgcttgagcaattgttactgcggcgcatggaagcgattaacgagagcctccatccaccgatggataatcgggtacgcgaggcttgtcagtacatcagcgatcacctggcagacagcaattttgatatcgccagcgtcgcacagcatgtttgcttgagcccgagccgtctgagtcatcttttccgccagcagttagggattagcgtcttaagctggcgcgaggaccaacgcattagtcaggcgaagctgcttttgagcactacccggatgcctatcgccaccgtcggtcgcaatgttggttttgacgatcaactctatttcagccgagtatttaaaaaatgcaccggggccagcccgagcgagtttcgtgccggttgtgaagaaaaagtgaatgatgtagccgtcaagttgagttaattggtaacgaatcagacaattgacggcttgacggagtagcatagggtttgcagaatccctgcttcgtccatttgacaggcacattatgcaagcattgctggaacactttattacccaatccaccgtgtatagtttgatggcggtggtgttggtggcctttctggagagcctggcgctggtcggtttgattctacccggtacggtgctgatggcggggctgggagcgctgattggcagcggcgagttaagtttctggcacgcctggctggcagggattattggctgcttgatgggcgactggatttctttctggctgggttggcgttttaaaaagccgttgcatcgctggagttttctgaagaaaaacaaagcactacttgataaaactgaacatgcgttgcatcaacacagcatgttcaccattctggtcggtcgttttgttggcccgacgcgtccgctggtgccaatggtggcgggaatgctggatctgccggtggctaaatttattacgccgaatattatcggctgcctgctgtggccgccgttttacttcctgccagggattctggcgggcgcggcgatcgatattcctgccggaatgcagagcggtgagtttaaatggttgctgctggcaacagcggtgtttttgtgggttggtggctggctgtgctggcggttatggcgcagcggtaaagcgactgaccgtttgagtcattatttgtcccgcggtcgtttgttgtggctgacgccgttgatttctgccatcggcgtggtggcgctggtggtgttaattcgccacccgttgatgccggtgtatatcgatattttgcgtaaagtggttggggtttaagagatagtcttgtgcgggttgcctgatgcgacgcttgccgcgtcttatcaggcctacaaaacgcactacccgtaggtcggataaggcgttcacgccgcatccgacagtgcatattaacccgtaatccccaatagtgcgctagcactcgccttaccgctcaacaactcattggtcataccctgccaggcgatgcgcccgtcggcgactactacgctgcgcgtggcgatccgcgccgcatcttccacgctgtggctcaccatcaatagcgtcattttttgctgctggcagctcgtgctcaccagcgtcaacatctcctgacgtaacgccggatcgagcgcagagaacggttcatcgagcaataaaatcggctgttcgcgtaccagacaacgcgctaacgccactcgctgtcgctgaccgccggaaagctcgcccggtaaccgcgccattaaattatcaatccccatctggcgggcgatagcgtgcattttcccctgctgtaccgcgttcagtttcaatcccggatttagccccagcccgatgttctgtgcgaccgtcaggtggctgaacaggttgttctcctgaaacagcatgctcaccggacggcgactcggcggcatagttgtgtgatctacgccatcgatagtcaggctaccgctggctggcgtcagaaaaccggcgatcaaattcagcagggtacttttacccgcgccgcttggcccgaggatcgccacctgctcgccgcgttccaccgttaagctaaaacgcatcggcaaatggtggtaaagccaggtgatatcagtcagttttaacatttcgccccggtagtttttcaatcacggtaaacagcagaaaacagagcagcagcagaattaacgcggtgaccgcaccgtcctggctgcgataggagccaatttgctggtagagataaaacggcagggtgcggaaatcatcgttaccgaacaacgccaccacgccaaaatcaccaatgctcagcacgcatgcaaaggccagcgcctgcgccagtggacgtttcagggcgcgcagctccaccacttttaagcgactccagccttcaatccccaggctctgacataacatgctgtagcgggcggtgatatcgcgcatcgggttttccagcactttcagcgcataagggatcgccattaacgcattggtgaaaatcacaatgccgtcagcagattgtggcaggccgatagtgttgttgagcagtaaaaagaagccggtagccagcacaatccccggcatggcgaggatcaacatgccgctcatctccagcacctgacccgccagcattttctgccgcgcccgcagttcgcgactgctccatagcagcatcatggtcagcactacgcacaatacacctgccgccagcgcaatacgcaagctggtccacagcgcctgccacagcaccggttgtgccagcacttccggcaactggcgatttaccccatcgacgatcaccgccagtaacggtggcagcaacagcagcagcgccagcacaattaacaccgtgtcgcaaatgcggctatgcagacgatcgtccgggtcgcgccagccttgcagcagcgtggtgccgggcgcaatggccttactcaatcgctgactcaacagcaccagcccgaggcagcacaccatctggagcagcgccagcattgccgcgcgggcaggatcgtagtcgtaactcagcgcctgatagattgccagctcgatagtggtcgcctgcggaccgccccccaggcttagcacggtggcgaagctggcgaaacagagcataaagataagcgcagcaaccggcgggatttgtcgccgtaaccacggccattcgacgaagcggaaaaaatgccagctacgcatcccaagctgggcggcaagttgacgctgttcgccggggatgttttccagtgcctggagtaataagcggctcgccatcggcagattaaaaaacacatgggccagcaaaataccttgcaggccgtaggggctaaaggtccactccagaccgaggctttggcagagtgttgccagccagccctggcgaccatagacgctaagaatgccgaaaacagcgaccaacaccgggaggatcaaggtcattgcacacagacgcaacagcgccagccgacccggaaagcgcctgcgatagagcgcgcgggcgaggaatatcgcgggtatgacagagagcagtgcgctgagaaacgcctgccagaaggagaagcgcaccacatgccacagatagctgtcctgccagactgccacccagtcatcctgcggcgcgttccaccacagggcgagaaacgccgccagcgcaaccgctaccaccagcgtggtggcgcttacacctggaattaaccagccgggaattaacggctgacggcgcgttgccattcgctaatccatgcctgacgttgtgccgccacttcggctggcgtgaactccaacgtggttgcgggtttggtcaatttttcaaaaccggcaggcagcgtgacgtttgccaccggatacatccagttgccggttgggatcgcattctggaaagccggagaaaccataaactggaggaatttttgcgccagctccggctgcttgctggcagcggtgcgggcggcgacttccacttgcagatagtgaccttcgctgaagttcgcggcggcgtagttatctttcttctcttcgagaatgtgataagccggagaggtggtgtaactcagtaccagatcgctttcaccttttaaaaacaggccgtaggcttcgctccagcctttggtgaccgtgaccgttttcttcgccagtttctgccaggcttgtggggcgtcatcgccatagactttttgcatccatagcaacagacccagccccggtgtactggtgcgcggatcctgataaatcacccgccagttttgatcgctctcaaccagttctttcaggctttgtggcgggtttttcagtttgttcttgtcataaacgaaggcgaagtagccataatcaaacggtacgaaagtgtcattattccagccgccgggaacgttaacggcatccgctgccacaccgcttttggcaaacagtccggttttactggcggcgtctaacaggttgttatccagccccagcaccacatcggctttactgtttttgccttccatccgtagacggttgagaaggctaacgccatcttccagcgccaccagtttcagttcgcaattacagtcggcttcaaaggcttttttaaccaccggaccaggcccccagtcggcggcgaaggaatcgtaggtataaacagtcagaacgggtttagcgaaaacgggcgctgtgcacagcaacagcaggggcagacatttttttaacactttgcacctcaaaaaagagtggcaaaggacttgagaaggagcctcaaatcccttcgccggcgttatccggatcaggttcgacgggtattttctcagcgcacgcgtacgcgtggcaccccgttgagaacggcgttagtgtagtgattttgttatcaaccagcaatcatggatccggtggcgcaaaccacgcacttttaaaatcgaaccagccgagggtattcatgcgcaggccgcgcatactgcgttgcccctgaatgatcagccagtggtgcaataatggcaccatcgctttgctggcgaccagttgctggcaccagttcgccagattcatctcgccattgcgccagcgagcagcgtcggcttgccagtcaatgggaatgcaatgttgtagcagtggcacttcgcataaatgtgcgaaaacagagaagtccagcggcagggtaaagttggcgctgtttagccagatatcactttcgatctctcctgtatgccactgatcgtagtcgatctctttgattttcagcgtgacctggtgacttgccagaatctgctgcatgatcccggcaatcacccgatgctcactgtgatcctgataaaaggttagggtgaggctttccaggccagccggtttttcgctctttatggtgcgggcatggtgccaacgggggagcagtccataagccgggaaccacagttgctggtactgttcctcagcgaaatagaccagattagttggagaaagcacatagcttacccagtccctgacttgctgattcgccccgcgatgggtgcggctgtcgaacagtaaatagtagcaaccttcctccaggcggctttcaatctctttttcctcgccctgtggaccttttagcatcagccctccggctggctcgtcggcaatttccggcagaacccagacgttaacttcgtcgattaatgcccggtaaccgaagaagtcatcgaatgcctgaattttcagttgattggtgctgttgcgaatcaccgcatacggaccggtgccgatgggatggctggcaaagttactgagggtttcccattcgcgcggcaggatcatcgccggaacttgccccagcagtaacggtaaccagcggtccggttgcgtgagatggatatccagcgtccagggcgtcgggctcacaatgtcagcaatatggctatagagcggcagcgtattgattcgttttaaagaggcgatcacatcgtccatttccagttcacgaccatggtgaaaatggactcctggacgcaaaaagaaacgccagtgaagcggactaatttgctgccagtggtgggcgatgtctgcttccagttccccattttcctcatttatgcgcgttaggctactgaagatttgccgggcgatatgggtttcggaacggcgcaatgcgctgccaggtagcagattacgcaacggacgatagtagagcacgcgcaggatgtgccgcccctggcggaagctgcggcccagatgagaaaccagcatttgccgcacagtcgctttgtcgccaaccaactgcaccagttgatcgatacgatcctgctccagcaggtcttccgcccgctgttgctgaagcgccagcccggtatagaggaatgtcagacggctgcgtttaccgcgcccgacttccgcttcccacgtcagccagccgcgatcctgcatggtgttgagcagggtgcgcatatgacgacggctgcagctcaataacgctgccagttcgttgagcgttgtgtcctggcttttaccctcgcagcattgccacaggcggatgaactgttgttgcagacgagcagatggcataaaaggggaactcctgtgcaaaagacagcaattttattttccctatattaagtcaataattcctaacgatgaagcaagggggtgccccatgcgtcagttttatcagcactattttaccgcgacagcgaagttgtgctggttgcgttggttaagcgtcccacaacgattaaccatgcttgaaggactgatgcagtgggatgaccgcaattctgaaagttgacttgcctgcatcatgtgtgactgagtattggtgtaaaatcacccgccagcagattatacctgctggttttttttattctcgccgcgctaaaaagggaacgtatgatctggataatgacgatggctcgccgtatgaacggtgtttacgcggcatttatgctggtcgcttttatgatgggggtggccggggcgctacaggctcctacattgagcttatttctgagtcgtgaggttggcgcgcaacctttctggatcggcctcttttatacggtgaatgctattgctgggatcggcgtaagcctctggttggcaaaacgttctgacagtcagggcgatcggcgaaaactgattatattttgctgtttgatggctatcggcaatgcgctattgtttgcatttaatcgtcattatctgacgcttatcacctgtggtgtgcttctggcatctctggccaatacggcaatgccacagttatttgctctggcgcgggaatatgcggataacagcgcgcgagaagtggtgatgtttagcagcgtgatgcgtgcgcagctttctctggcatgggttatcggtccaccgttggcctttatgctggcgttgaattacggctttacggtgatgtttagcattgccgccgggatattcacactcagtctggtattgattgcatttatgcttccgtctgtggcgcgggtagaactgccgagcgaaaatgctttaagtatgcaaggtggctggcaggatagtaacgtacggatgttatttgtcgccagcacgttaatgcggacctgcaacaccatgtacattattgatatgccgttgtggatcagtagcgagttaggattgccagacaaactggcgggtttcctgatggggacggcagctggactggaaataccagcaatgattctggctggctactatgtcaaacgttatggtaagcggcgaatgatggtcatagcagtggcggcaggagtactgttttacaccggattgattttctttaatagccgtatggcgttgatgacgctgcaactttttaacgctgtatttatcggcattgttgcgggtattgggatgctatggtttcaggatttaatgcctggaagagcgggggcagctaccaccttatttactaacagtatttctaccggggtaattctggctggcgttattcagggagcaattgcacaaagttgggggcactttgctgtctactgggtaattgcggttatttctgttgtcgcattatttttaaccgcaaaggttaaagacgtttgatgacgtggacgatagcggaaagcccggtcatttgaccgggcaaggggattaattcataaacgcaggttgttttgcttcataagcggcaatggcgtcgtcgtgctgcaaggtaagcccaatactgtccagaccgttcatcatgcagtggcggcggaaggcatcgatggtaaagcgataggttttctctcccgctttcacctcttgcgcttccagatccacgtcgaaatggatccccggattagctttcaccagcgcaaacagttcgtccacttctgcatcgcttaatttcaccggcagcagctggttgttaaagctattgccgtagaagatgtcagcaaaactcggcgcaatcaccactttaaaaccgtagtcggtcaatgcccagggcgcgtgctcacggctagagccacagccgaagttttctcgtgccagcaaaatggaagcgccctgatactgcgggaagttcagcacgaagtccgggtttggctgttggcctttttcatccagaaaacgccagtcgttaaacagatgcgcgccaaaacccgtacgggtcactttctgcaaaaactgtttcgggatgattgcatcggtatcgacattggcggcatccagcggaaccaccaggcctgtgtgtttgataaatttctctgccatggtgtgctccttatttaatgttgcgaatgtcggcgaaatgtccggtcacagcagcagcggcagccattgccgggctgaccagatgcgtgcgcccgccgcgcccctggcggccttcaaagttacggttgctggtggaggcacaacgttcgcccggattcagacggtcgttgttcatcgccagacacatactgcagccaggcaagcgccattcaaaaccggcttcaataaagattttatccagaccttccgcttccgcctgggcttttaccgggccagagccgggaaccaccagtgcctgcacgcctggcgcgacttttcgccctttggcgatctccgctgccgcgcgtaaatcttcaatgcggctgttggtacaggaaccgataaacactttgtcgatagccacttcggtcagcggaatacccggtttcagccccatataggccagcgctttttctgcgctcgcgcgttcaaccggatcggcaaagctagccggatcgggaatattgtcgttcacggaaatcacctggccgggattggtgccccaggtgacctgcggactaatttcttctgcttgcagagtgacaacggtatcgaaagttgcgccttcgtcggtttgcagggttttccagtaggcaacggcgtcgtcgaaatctttgcctttcggcgcatgcagacggcctttgacatagttaaaggtggtttcgtccggtgcaaccagaccggcttttgcgcccatttcgattgccatattgcacagggtcatacgaccttccatgcttaaatcacggattgcttcgccgcaaaactccaccacatgcccggtgccgcctgcgctaccggttttaccgataattgccagcacgatatcttttgcggtaatgcccggcgcggctttgccctggacttcaattttcatggtttttgcgcggccctgtttcagggtttgcgttgccagtacgtgttcaacttcggaagtgccgataccaaaggccagtgcgccaaacgcgccgtgggtggcggtatggctgtcgccgcagacaatggtcatccccggcaaggtgacgccctgttccggccccattacgtggacgatcccctgatacgggtgattcaggtcatacagttcgacgccaaattctttgcagtttttgatcagttcctgcatctggatacgcgccatttcaccgcaggcattaatgtctttggtctgggtagagacgttgtgatccatggtagcgaaggttttgcccggctgacgtaccgggcgaccgtgggcgcgcagaccatcgaacgcctgcggactggtcacttcatgcaccaggtggcggtcgatatataacagtggggtttcgttttcggcttcgtacacaacgtgagcgtcgaacaatttttcgtataacgtcttagccatgattacaccccttctgctacatagcgggcaatgatatcgcccatttcatcggtactaacggcggcagcgccacgggctaaatccccggtgcgaatgccttcttctaatgcgcggttaatggcgcgttcaatggcgcaagccgcatcatcggcatccaggctgtaacgcagcagcagtgccaggctaaggatttgtgcaatcgggttggcgatgtttttgcctgcgatatctggtgcgctgccgcccgccggttcatacagtccaaaaccttgctcgttcaggctggcggaaggcaacatccccatgctgccagtgatcattgcgcactcgtcagacagaatgtcgccaaacaggttggagcacagcagaacgtcaaactgacttggatctttaatcagctgcatggtggcgttgtcgatgtacatatgcgccagttcgacatccgggtattccgtggcgatctcgttaacgatctcccgccataaaatagaggattgcagcacgttggctttatcgatgctcgtcactttgtggcgacgcttgcgagcagattcaaacgcgatgcgggcgatacgttcgatctcaaaacggtgatacacctcggtatcaaaggctttttcatattgtccgctaccttcgcggccttttggctgaccgaaatagatgccgccggtcagttcgcgcacacacaggatgtcgaagccgtttgcggcaatgtctgcacgcagcggacagaatgcttccagcccctgatacagttttgccgggcgcaggttgctgaataatttgaagtgcttacgcagaggcagcagcgcgccgcgttctggttgctggtctggtggtaaatgttcccacttcgggccgcctacgctgccaaacagcacggcatcggcttgctcacaaccttcaaccgtcgcaggcggcagtggttgcccgtggttatcaatggctgcgccgcctacatcgtaatggctggtggtgatgcgcatcgcaaagcggttgcgcacggcatccagcactttcagcgcctgggtcatcacttccggaccaataccgtcccccggcaatacggcaatatggtaattcttgctcatcacacggtttccttgttgttttcgttgtgttgagctttgcgttgcaactctttttcgacttctgcggcacgccagatattgttcagaacgtgcaccatggctttggcagaactctcgacaatatcggtagccaggccgacgccgtggaagcggcgaccgttgtagttagcgacgatatccacctgacccagcgcatctttaccgtggcctttggcggtcaggctgtatttcaccagttcgacgttatattcagtgatgcggttaattgcctgatagacggcatcgaccggaccgttaccgttggcggcttctgctttgacttcttcgccacaggccagtttgacggcggcggtggcgatatcgttagagccagactgcacgctgaagtaatccagacggaaatgctccggctcttcttgctgcttaccgatgaaggccagcgcctccagatcgtaatcaaacacctgaccttttttgtccgccagcttcaggaaagcatcgtacaaattgtctaaattatattcactttctttataccccatctcatccatgcgatgtttcaccgccgcacgcccgctacgagaggtcagattcagctggatttggttcagaccaatagattctggtgtcatgatttcgtagttttcgcggtttttcagcacgccatcctggtgtataccggaggagtgtgcgaatgcgccgctgccaacaatggctttgtttgccgggatcggcatattacaaatctggctaactaactggctggtgcgccatatctcctggtgattaatggcggtgtggacgttgagaatatccttacgaactttgatcgccatgatgacttcttccagggaacagtttccggcacgctcgccgatcccgttcattgcgccttccacctggcgtgcaccggcatgtaccgccgccagactgtttccgaccgccaggcccaaatcgtcgtgggtatgtacggagataatggctttgtcgatgttaggcacgcgttcatacaggccgctgatgattccggcgaactcaaacggcatggtgtagcccacggtgtccggaatgttgatggtggtggcaccggcattaatcgccgcttcgaccactcgcgccagatcggcaatgggtgtacgcccggcatcttcgcaagaaaattcaacatcatcggtgtaattacgggcgcgtttcaccatatagatagcgcgttcgatcacctcgtccagcgtgctgcgcagcttggtggcgatgtgcattgggctagtggcaataaaggtatgaatacggaaggcttcggcgactttcagggattcggccgccacgtcgatatctttttccacgcagcgagctaacgcacatacgcggctgtttttaacctggcgggcgatggtttgcacgctttcaaaatcgcccgggctagagacggggaaaccgacttccatcacgtcaacacccatacgctcaagggccagcgcaatttgcagtttttctttcacactcaagcttgcctgtaacgcctgttcaccgtcgcgcaatgtggtatcgaaaataatgacttgctggctcatggtttgggtccttgtctcttttagagcgcctcgcttcgggcataaaaaaacccgcgcaatggcgcgggttttttgtttgactgcgtgctggcttaatgctggatgccgctcactcgtctaccgcgcaaagaagatgcgtttagtagtagtagaccgataaagcgaacgatgtgagtcattaaatcagctccagatgaatgcgatatgcttttagagttactggatacaaaaacggatgtcaaccctgacgcaataaaaacgtcccgccagcgtgagttctgcatccgtaaaattagctaattgtgctgcggtggttaaagtaagcgatattaatttctgcttaactaccgacgcttttcatcggttgacatatttcagcataaatttttgcatctaatcaacgaggaaaaaggggacaaaatgcacgcgttgcaaaacctatcctgatgatttgtattgaattatatgttttgcgattttttttgatattgatttggtgaatattattgatcaattaatgttaagaattaatgcattaaatatataaattaattattaaataagcacatttaatccattttgtagatgattgagtattcgcggtagttatgattagattgttttcgcaacaaaaacattatggattattatgctgtggtaaatgactcattccacggcaatggattctgtttttatcagaacccgtatctttatgttttccgaattttactcattttgctttttcttattttatatgcatgataaatcatattcttcaggattatttctctgcattccaataagggaaagggagttaagtgtgacagtggagttaagtatgccagaggtacaaacagatcatccagagacggcggagttaagcaaaccacagctacgcatggtcgatctcaacttattaaccgttttcgatgccgtgatgcaggagcaaaacattactcgtgccgctcatgttctgggaatgagccaacctgcggtcagtaacgctgttgcacgcctgaaggtgatgtttaatgacgagctttttgttcgttatggccgtggtattcaaccgactgctcgcgcatttcaactttttggtagtgttcgtcaggcattgcaactagtacaaaatgaattgcctggtagtggttttgaacccgcgagcagtgaacgtgtatttcatctttgtgtttgcagcccgttagacagcattctgaccagccagatttataatcacattgagcagattgcgccaaatatacatgttatgttcaagtctagtttaaatcagaacactgaacatcagctgcgttatcaggaaacggagtttgtgattagttatgaagacttccatcgtcctgaatttaccagcgtaccattatttaaagatgaaatggtgctggtagccagcaaaaatcatccaacaattaagggcccgttactgaaacatgatgtttataacgaacaacatgcggcggttagcctcgatcgtttcgcgagttttagtcaaccttggtatgacacggtagataagcaagccagtatcgcgtatcagggcatggcaatgatgagcgtacttagcgtggtgagccaaacgcatttggtcgctattgcgccgcgttggctggctgaagagttcgctgaatccttagaattacaggtattaccgctgccgttaaaacaaaacagcagaacctgttatctctcctggcatgaagctgccgggcgcgataaaggccatcagtggatggaagagcaattagtcagtatttgcaaacgctaactgattgcagaataggtcagacatgaatgtctggtttattctgcattttttattgaatgtagaattttattctgaatgtgtgggctctctattttaggattaattaaaaaaatagagaaattgctgtaagttgtgggattcagccgatttattatcaatttaatcctctgtaatggaggattttatcgtttcttttcacctttcctcctgtttattcttattaccccgtgtttatgtctctggctgccaattgcttaagcaagatcggacggttaatgtgttttacacattttttccgtcaaacagtgaggcaggccatggagatgttgtctggagccgagatggtcgtccgaagccttatcgatcagggcgttaaacaagtattcggttatcccggaggcgcagtccttgatatttatgatgcattgcataccgtgggtggtattgatcatgtattagttcgtcatgagcaggcggcggtgcatatggccgatggcctggcgcgcgcgaccggggaagtcggcgtcgtgctggtaacgagcggtccaggggcgaccaatgcgattactggcatcgccaccgcttatatggattccattccattagttgtcctttccgggcaggtagcgaccagcttgataggttacgatgcctttcaggagtgcgacatggtggggattagccgaccggtggttaaacacagttttctggttaagcaaacggaagacattccgcaggtgctgaaaaaggctttctggctggcggcaagtggtcgcccaggaccagtagtcgttgatttaccgaaagatattcttaatccggcgaacaaattaccctatgtctggccggagagcgtcagtatgcgttcttacaatcccactactaccggacataaagggcaaattaagcgtgctctgcaaacgctggtagcggcaaaaaaaccggttgtctacgtaggcggtggggcaatcacggcgggctgccatcagcagttgaaagaaacggtggaggcgttgaatctgcccgttgtttgcagtttgatggggctgggggcgtttccggcaacgcatcgtcaggcactgggcatgctgggaatgcacggtacctacgaagccaatatgacgatgcataacgcggatgtgattttcgccgtcggggtacgatttgatgaccgaacgacgaacaatctggcaaagtactgcccaaatgccactgttctgcatatcgatattgatcctacttccatttctaaaaccgtgactgcggatatcccgattgtgggggatgctcgccaggtcctcgaacaaatgcttgaactcttgagccaagaatccgcccatcaaccactggatgagatccgcgactggtggcagcaaattgaacagtggcgcgctcgtcagtgcctgaaatatgacactcacagtgaaaagattaaaccgcaggcggtgatcgagactctttggcggttgacgaagggagacgcttacgtgacgtccgatgtcgggcagcaccagatgtttgctgcactttattatccattcgacaaaccgcgtcgctggatcaattccggtggcctcggcacgatgggttttggtttacctgcggcactgggcgtcaaaatggcgttgccagaagaaaccgtggtttgcgtcactggcgacggcagtattcagatgaacatccaggaactgtctaccgcgttgcaatacgagttgcccgtactggtggtgaatctcaataaccgctatctggggatggtgaagcagtggcaggacatgatctattccggccgtcatagtcaatcttatatgcaaagcctacccgatttcgtccgtctggcggaagcctatgggcatgtcgggatccagatttctcatccgcatgagctggaaagcaaacttagcgaggcgctggaacaggtgcgcaataatcgcctggtgtttgttgatgttaccgtcgatggcagcgagcacgtctacccgatgcagattcgcgggggcggaatggatgaaatgtggttaagcaaaacggagagaacctgattatgcgccggatattaagtgtcttactcgaaaatgaaagtggcgcgttatcccgcgtgattggccttttttcccagcgtggctacaacattgaaagcctgaccgttgcgccaaccgacgatccgacattaagccgtatgaccatccagaccgtgggcgatgaaaaagtacttgagcagatcgaaaagcaattacacaaactggtcgatgtcttgcgcgtgagtgagttggggcagggcgcgcatgttgagcgggaaatcatgctggtgaaaattcaggccagcggttacgggcgtgacgaagtgaaacgtaatacggaaatattccgtgggcaaattatcgatgtcacacccagcctttataccgttcaattagcaggcaccagcggtaagcttgatgcatttttagcaagcattcgcgatgtggcgaaaattgtggaggttgctcgctctggtgtggtcggacttagccgcggcgataaaataatgcgttgagaatgatctcaatgcgcaatttacagcccaacatgtcacgttgggctttttttgcgaaatcagtgggaacctggaataaaagcagttgccgcagttaattttctgcgcttagatgttaatgaatttaacccataccagtacaatggctatggtttttacattttacgcaaggggcaattgtgaaactggatgaaatcgctcggctggcgggagtgagccggaccactgcaagctatgttattaacggcaaagcgaagcaataccgtgtgagcgacaaaaccgttgaaaaagtcatggctgtggtgcgtgagcacaattaccacccgaacgccgtggcagctgggcttcgtgctggacgcacacgttctattggtcttgtgatccccgatctggagaacaccagctatacccgcatcgctaactatcttgaacgccaggcgcggcaacggggttatcaactgctgattgcctgcagtgaagatcagccagacaacgaaatgcggtgcattgagcaccttttacagcgtcaggttgatgccattattgttagcacgagcttgcctcctgagcatcctttttatcaacgctgggctaacgacccgttcccgattgtcgcgctggaccgcgccctcgatcgtgaacacttcaccagcgtggttggtgccgatcaggatgatgccgaaatgctggcggaagagttacgtaagtttcccgccgagacggtgctttatcttggtgcgctaccggagctttctgtcagcttcctgcgtgaacaaggtttccgtactgcctggaaagatgatccgcgcgaagtgcatttcctgtatgccaacagctatgagcgggaggcggctgcccagttattcgaaaaatggctggaaacgcatccgatgccgcaggcgctgttcacaacgagctttgcgttgttgcaaggagtgatggatgtcacgctgcgtcgcgacggcaaactgccttctgacctggcaattgccacctttggcgataacgaactgctcgacttcttacagtgtccggtgctggcagtggctcaacgtcaccgcgatgtcgcagagcgtgtgctggagattgtcctggcaagcctggacgaaccgcgtaagccaaaacctggtttaacgcgcattaaacgtaatctctatcgccgcggcgtgctcagccgtagctaagccgcgaacaaaaatacgcgccaggtgaatttccctctggcgcgtagagtacgggactggacatcaatatgcttaaagtaaataagactattcctgactattattgataaatgcttttaaacccgcccgttaattaactcaccagctgaaattcacaataattaagtgatatcgacagcgcgtttttgcattattttgttacatgcggcgatgaattgccgatttaacaaacacttttctttgcttttgcgcaaacccgctggcatcaagcgccacacagacgtaacaaggactgttaaccggggaagatatgtcctaaaatgccgctcgcgtcgcaaactgacactttatatttgctgtggaaaatagtgagtcattttaaaacggtgatgacgatgagggattttttcttacagctattcataacgttaatttgcttcgcacgttggacgtaaaataaacaacgctgatattagccgtaaacatcgggttttttacctcggtatgccttgtgactggcttgacaagcttttcctcagctccgtaaactcctttcagtgggaaattgtggggcaaagtgggaataaggggtgaggctggcatgttccggggagcaacgttagtcaatctcgacagcaaagggcgcttaagtgtgcctacccgttatcgggaacagctgcttgagaacgctgccggtcaaatggtttgcaccattgacatttatcacccgtgcctgctgctttaccccctgcctgaatgggaaattatcgagcaaaaattaagccgtctgagcagcatgaacccggttgagcgccgtgtgcagcgcctactgttaggtcatgccagcgaatgtcagatggatggcgcaggtcgattgttaatcgcgccagtactgcggcaacatgccgggctgacaaaagaagtgatgctggttggacagttcaacaagtttgagctgtgggatgaaacaacctggcatcaacaggtcaaggaagatatcgacgcagagcagttggctaccggagacttaagcgagcgactgcaggacttgtctctataaaatgatggaaaactataaacatactacggtgctgctggatgaagccgttaatggcctcaatatccgtcctgatggcatctacattgatgggacttttggtcgcggtggtcacagtcgtctgatcctcagccagcttggcgaagaggggcgtttgctggcgatcgatcgcgacccgcaggctatcgccgttgcgaagactattgatgatccgcgcttctccatcatccacggacctttctccgcgctgggcgaatacgttgccgagcgcgatcttatcggcaagatcgacggcattctcctcgatcttggcgtctctagtccgcaacttgatgatgctgaacgtggcttttcctttatgcgcgatggtccgctggacatgcgtatggacccaacccgtgggcagagtgccgctgaatggctacaaaccgcagaagaagccgatatcgcctgggtattgaaaacctatggtgaagagcgttttgccaaacgcattgcccgcgccattgtcgagcgtaaccgcgaacagccgatgacccgcaccaaagaactggcggaagtcgtggctgctgcaacgccggtgaaagataagtttaaacatcccgcgacccgtaccttccaggcggtgcgcatttgggtaaacagtgaactggaggagatagagcaggcgctaaaaagcagcctcaacgtgctggccccgggtgggcggcttagcatcatcagcttccacagcctggaagaccgtattgtgaaacgttttatgcgtgaaaacagccgcggtccgcaagttccggcagggttaccgatgactgaagagcagctcaaaaaactgggtggccgtcagctgcgagcactaggcaagttaatgccgggcgaagaagaggtggctgagaaccctcgtgcccgtagtagtgttctgcgtattgcagagaggacgaatgcatgatcagcagagtgacagaagctctaagcaaagttaaaggaagcatgggaagccacgagcgccatgcattgcctggtgttatcggtgacgatcttttgcgatttgggaagctgccactctgcctgttcatttgcattattttgacggcggtgactgtggtaaccacggcgcaccatacccgtttactgaccgctcagcgcgaacaactggtgctggagcgagatgctttagacattgaatggcgcaacctgatccttgaagagaatgcgctcggcgaccatagccgggtggaaaggatcgccacggaaaagctgcaaatgcagcatgttgatccgagtcaagaaaatatcgtagtgcaaaaataaggataaacgcgacgcatgaaagcagcggcgaaaacgcagaaaccaaaacgtcaggaagaacatgccaactttatcagttggcgttttgcgttgttatgcggctgtattctcctggcgctggcttttctgctcggacgcgtagcgtggttacaagttatctccccggatatgctggtgaaagagggcgacatgcgttctcttcgcgttcagcaagtttccacctcccgcggcatgattactgaccgttctggtcgcccgttagcggtgagcgtgccggtaaaagcgatttgggctgacccgaaagaagtgcatgacgctggcggtatcagcgtcggtgaccgctggaaggcgctggctaacgcgctcaatattccgctggatcagcttagtgcccgcattaacgccaacccgaaagggcgctttatttatctggcgcgtcaggtgaaccctgacatggcggactacatcaaaaaactgaaactgccggggattcatctgcgtgaagagtctcgccgttactatccgtccggcgaagtgactgctcacctcatcggctttactaacgtcgatagtcaagggattgagggcgttgagaagagtttcgataaatggcttaccgggcagccgggtgagcgcattgtgcgtaaagaccgctatggtcgcgtaattgaagatatttcttctactgacagccaggcagcgcacaacctggcgctgagtattgatgaacgcctgcaggcgctggtttatcgcgaactgaacaacgcggtggcctttaacaaggctgaatctggtagcgccgtgctggtggatgtcaacaccggtgaagtgctggcgatggctaacagcccgagttacaaccctaacaatctgagcggcacgccgaaagaggcgatgcgtaaccgtaccatcaccgacgtgtttgaaccgggcagtacggttaaaccgatggtggtaatgaccgcgttgcaacgtggcgtggtgcgggaaaacagcgtactcaataccattccttatcgaattaacggccacgaaatcaaagacgtggcacgctacagcgaattaaccctgaccggggtattacagaagagcagtaacgtcggtgtttccaagctggcgttagcgatgccgtccagtgcgttagtagatacttacagtcgttttggactgggaaaagcgaccaatttggggttggtcggagaacgcagtggcttatatcctcaaaaacaacggtggtctgacatagagagggccaccttctctttcggctacgggctaatggtaacaccattacagttagcgcgagtctacgcaactatcggcagctacggcatttatcgcccactgagcattaccaaagttgaccccccggttcccggtgaacgtgtcttcccggaatccattgtccgcactgtggtgcatatgatggaaagcgtggcgctaccaggcggcggcggcgtgaaggcggcgattaaaggctatcgtatcgccattaaaaccggtaccgcgaaaaaggtcgggccggacggtcgctacatcaataaatatattgcttataccgcaggcgttgcgcctgcgagtcagccgcgcttcgcgctggttgttgttatcaacgatccgcaggcgggtaaatactacggcggcgccgtttccgcgccggtctttggtgccatcatgggcggcgtattgcgtaccatgaacatcgagccggatgcgctgacaacgggcgataaaaatgaatttgtgattaatcaaggcgaggggacaggtggcagaagctaaagcctgagcgcttcgcgctggttgttgttatcaacgatccgcaggcgggtaaatactacggcggcgccgtttccgcgccggtctttggtgccatcatgggcggcgtattgcgtaccatgaacatcgagccggatgcgctgacaacgggcgataaaaatgaatttgtgattaatcaaggcgaggggacaggtggcagatcgtaatttgcgcgaccttcttgctccgtgggtgccagacgcacctagccgagcactgcgagagatgacactcgacagccgtgtggctgcggcgggcgatctctttgtagctgtagtaggtcatcaggcggacgggcgtcgatatatcccgcaggcgatagcgcaaggtgtggctgccattattgcagaggcgaaagatgaggcgaccgatggtgaaatccgtgaaatgcacggcgtaccggtcatctatctcagccagctcaacgagcgtttatctgcactggcgggccgcttttaccatgaaccctctgacaatttacgtctcgtgggcgtaacgggcaccaacggcaaaaccacgactacccagctgttggcgcagtggagccaactgcttggcgaaatcagcgcggtaatgggcaccgttggtaacggcctgctggggaaagtgatcccgacagaaaatacaaccggtagcgcagtcgatgttcagcatgagctggcggggctggtggatcagggcgcgacgttttgcgcaatggaagtttcctcccacgggctggtacagcaccgtgtggcggcattgaaatttgcggcgagcgtctttaccaacttaagccgcgatcaccttgattatcatggtgatatggaacactacgaagccgcgaaatggctgctttattctgagcatcattgcggtcaggcgattattaacgccgacgatgaagtgggccgccgctggctggcaaaactgccggacgcggttgcggtaagtatggaagatcatattaatccgaactgtcacggacgctggttgaaagcgaccgaagtgaactatcacgacagcggtgcgacgattcgctttagcagtagttggggcgatggcgaaattgaaagccatctgatgggcgcttttaacgtcagcaacctgctgctcgcgctggcgacactgttggcactcggctatccactggctgatctgctgaaaaccgccgcgcgtctgcaaccggtttgcggacgtatggaagtgttcactgcgccaggcaaaccgacggtggtggtggattacgcgcatacgccggatgcactggaaaaagccttacaggcggcgcgtctgcactgtgcgggcaagctgtggtgtgtctttggctgtggtggcgatcgcgataaaggtaagcgtccactgatgggcgcaattgccgaagagtttgctgacgtggcggtggtgacggacgataacccgcgtaccgaagaaccgcgtgccatcatcaacgatattctggcgggaatgttagatgccggacatgccaaagtgatggaaggccgtgctgaagcggtgacttgcgccgttatgcaggctaaagagaatgatgtggtactggtcgcgggcaaaggccatgaagattaccagattgttggcaatcagcgtctggactactccgatcgcgtcacggtggcgcgtctgctgggggtgattgcatgattagcgtaacccttagccaacttaccgacattctcaacggtgaactgcaaggtgcagatatcacccttgatgctgtaaccactgatacccgaaaactgacgccgggctgcctgtttgttgccctgaaaggcgaacgttttgatgcccacgattttgccgaccaggcgaaagctggcggcgcaggcgcactactggttagccgtccgctggacatcgacctgccgcagttaatcgtcaaggatacgcgtctggcgtttggtgaactggctgcatgggttcgccagcaagttccggcgcgcgtggttgctctgacggggtcctccggcaaaacctccgttaaagagatgacggcggcgattttaagccagtgcggcaacacgctttatacggcaggcaatctcaacaacgacatcggtgtaccgatgacgctgttgcgcttaacgccggaatacgattacgcagttattgaacttggcgcgaaccatcagggcgaaatagcctggactgtgagtctgactcgcccggaagctgcgctggtcaacaacctggcagcggcgcatctggaaggttttggcagccttgcgggtgtcgcgaaagcgaaaggtgaaatctttagcggcctgccggaaaacggtatcgccattatgaacgccgacaacaacgactggctgaactggcagagcgtaattggcagtcgcaaagtgtggcgtttcagtcccaatgccgccaacagcgatttcaccgccaccaatatccatgtgaccagccacggtacggaatttaccctacaaaccccaaccggtagcgtcgatgttctgctgccgttgccggggcgtcacaatattgcgaatgcgctggcagccgctgcgctctccatgtccgtgggcgcaacgcttgatgctatcaaagcggggctggcaaatctgaaagctgttccaggccgtctgttccccatccaactggcagaaaaccagttgctgctcgacgactcctacaacgccaatgtcggtagtatgactgcagcagtccaggtactggctgaaatgccgggctaccgcgtgctggtggtgggcgatatggcggaactgggcgctgaaagcgaagcctgccatgtacaggtgggcgaggcggcaaaagctgctggtattgaccgcgtgttaagcgtgggtaaacaaagccatgctatcagcaccgccagcggcgttggcgaacattttgctgataaaactgcgttaattacgcgtcttaaattactgattgctgagcaacaggtaattacgattttagttaagggtagtcgtagtgccgccatggaagaggtagtacgcgctttacaggagaatgggacatgttaatataagctttacaggagaatgggacatgttagtttggctggccgaacatttggtcaaatattattccggctttaacgtcttttcctatctgacgtttcgcgccatcgtcagcctgctgaccgcgctgttcatcagtttgtggatgggcccgcgtatgattgctcatttgcaaaaactttcctttggtcaggtggtgcgtaacgacggtcctgaaagtcacttcagcaagcgcggtacgccgaccatgggcgggattatgatcctgacggcgattgtgatctccgtactgctgtgggcttacccgtccaatccgtacgtctggtgcgtgttggtggtgctggtaggttacggtgttattggctttgttgatgattatcgcaaagtggtgcgtaaagacaccaaagggttgatcgctcgttggaagtatttctggatgagcgtcattgcgctgggtgtcgccttcgccctgtaccttgccggcaaagacacgcccgcaacgcagctggtggtcccattctttaaagatgtgatgccgcagctggggctgttctacattctgctggcttacttcgtcattgtgggtactggcaacgcggtaaacctgaccgatggtctcgacggcctggcaattatgccgaccgtatttgtcgccggtggttttgcgctggtggcgtgggcgaccggcaatatgaactttgccagctacttgcatataccgtatctgcgacacgccggggaactggttattgtctgtaccgcgatagtcggggcaggactgggcttcctgtggtttaacacctatccggcgcaggtctttatgggcgatgtaggtagcctggcgttaggtggtgcgttaggcattatcgccgtactgctacgtcaggaattcctgctggtgattatggggggcgtgttcgtggtagaaacgctttctgtcatcctgcaggtcggctcctttaaactgcgcggacaacgtattttccgcatggcaccgattcatcaccactatgaactgaaaggctggccggaaccgcgcgtcattgtgcgtttctggattattagcctgatgctggttctgattggtctggcaacgctgaaggtacgttaatcatggctgattatcagggtaaaaatgtcgtcattatcggcctgggcctcaccgggctttcctgcgtggactttttcctcgctcgcggtgtgacgccgcgcgttatggatacgcgtatgacaccgcctggcctggataaattacccgaagccgtagaacgccacacgggcagtctgaatgatgaatggctgatggcggcagatctgattgtcgccagtcccggtattgcactggcgcatccatccttaagcgctgccgctgatgccggaatcgaaatcgttggcgatatcgagctgttctgtcgcgaagcacaagcaccgattgtggcgattaccggttctaacggcaaaagcacggtcaccacgctagtgggtgaaatggcgaaagcggcgggggttaacgttggtgtgggtggcaatattggcctgcctgcgttgatgctactggatgatgagtgtgaactgtacgtgctggaactgagcagcttccagctggaaaccacctccagcttacaggcggtagcagcgaccattctgaacgtgactgaagatcatatggatcgctatccgtttggtttacaacagtatcgtgcagcaaaactgcgcatttacgaaaacgcgaaagtttgcgtggttaatgctgatgatgccttaacaatgccgattcgcggtgcggatgaacgctgcgtcagctttggcgtcaacatgggtgactatcacctgaatcatcagcagggcgaaacctggctgcgggttaaaggcgagaaagtgctgaatgtgaaagagatgaaactttccgggcagcataactacaccaatgcgctggcggcgctggcgctggcagatgctgcagggttaccgcgtgccagcagcctgaaagcgttaaccacattcactggtctgccgcatcgctttgaagttgtgctggagcataacggcgtacgttggattaacgatagcaaagcgaccaacgtcggcagtacggaagcggcgctgaatggcctgcacgtagacggcacactgcatttgttgctgggtggcgatggtaaaagcgcggactttagcccactggcgcgttacctgaatggcgataacgtacgtctgtattgtttcggtcgtgacggcgcgcagctggcggcgctacgtccggaagtggcagaacaaaccgaaactatggaacaggcgatgcgcttgctggctccgcgtgttcagccgggcgatatggttctgctctccccagcctgtgccagccttgatcagttcaagaactttgaacaacgaggcaatgagtttgcccgtctggcgaaggagttaggttgatgcgtttatctctccctcgcctgaaaatgccgcgcctgccaggattcagtatcctggtctggatctccacggcgctaaagggctgggtgatgggcagccgggaaaaagataccgacagcctgatcatgtacgatcgcaccttactgtggctgaccttcggcctcgcggcgattggctttatcatggtgaccagcgcgagtatgcccatagggcaacgcttaaccaacgatccgttcttcttcgcgaagcgtgatggtgtctatctgattttggcgtttattctggcgatcattacgctgcgtctgccgatggagttctggcaacgctacagtgccacgatgctgctcggatctatcatcctgctgatgatcgtcctggtagtgggtagcagcgttaaaggggcaagccgttggatcgatctcggtttgctgcgtatccagcctgcggagctgacaaaactgagcctgttttgctatatcgccaactatctggtgcgtaaaggcgacgaagtacgtaataacctgcgcggcttcctgaaaccgatgggcgtgattctggtgttggcagtgttactgctggcacagccagaccttggtacggtggtggtgttgtttgtgactacgctggcgatgttgttcctggcgggagcgaaattgtggcagttcattgccattatcggtatgggcattagtgcggttgtgttgctgatactcgccgaaccgtaccgtatccgccgtgttaccgcattctggaacccgtgggaagatccctttggcagcggctatcagttaacgcaaagcctgatggcgtttggtcgcggcgaactttgggggcaaggtttaggtaacagcgtacaaaaactggagtatctgccggaagcgcacactgactttattttcgccattatcggcgaagaactggggtatgtcggtgtggtgctggcacttttaatggtattcttcgtcgcttttcgcgcgatgagcattggccgtaaagcattagaaattgaccaccgtttttccggttttctcgcctgttctattggcatctggtttagcttccaggcgctggttaacgtaggcgcggcggcggggatgttaccgaccaaaggtctgacattgccgctgatcagttacggtggtagcagcttactgattatgagcacagccatcatgatgctgttgcgtattgattatgaaacgcgtctggagaaagcgcaggcgtttgtacgaggtagtcgatgagtggtcaaggaaagcgattaatggtgatggcaggcggaaccggtggacatgtattcccgggactggcggttgcgcaccatctaatggctcagggttggcaagttcgctggctggggactgccgaccgtatggaagcggacttagtgccaaaacatggcatcgaaattgatttcattcgtatctctggtctgcgtggaaaaggtataaaagcactgatagctgccccgctgcgtatcttcaacgcctggcgtcaggcgcgggcgattatgaaagcgtacaaacctgacgtggtgctcggtatgggaggctacgtgagtggtccaggtggtctggccgcgtggagcttaggcattccggttgtacttcatgaacaaaacggtattgcgggcttaaccaataaatggctggcgaagattgccaccaaagtgatgcaggcgtttccaggtgctttccctaatgcggaagtagtgggtaacccggtgcgtaccgatgtgttggcgctgccgttgccgcagcaacgtttggctggacgtgaaggtccggttcgtgtgctggtagtgggtggttctcagggcgcacgcattcttaaccagacaatgccgcaggttgctgcgaaactgggtgatagtgtcactatctggcatcagagcggcaaaggtagccaacaatccgttgaacaggcgtatgccgaagcggggcaaccgcagcataaagtgacggaatttattgatgatatggcggcggcgtatgcgtgggcggatgtcgtcgtttgccgctccggtgcgttaacggtgagtgaaatcgccgcggcaggactaccggcgttgtttgtgccgtttcaacataaagaccgccagcaatactggaatgcgctaccgctggaaaaagcgggcgcagccaaaattatcgagcagccacagcttagcgtggatgctgtcgccaacaccctggccgggtggagccgagaaaccttattaaccatggcagaacgcgcccgcgctgcatccattccggatgccaccgagcgagtggcaaatgaagtgagccgggttgcccgggcgtaattgtagcgatgccttttgcatcgtatgaatttaagaagttaatggcgtaaagaatgaatacacaacaattggcaaaactgcgttccatcgtgcccgaaatgcgtcgcgttcggcacatacattttgtcggcattggtggtgccggtatgggcggtattgccgaagttctggccaatgaaggttatcagatcagtggttccgatttagcgccaaatccggtcacgcagcagttaatgaatctgggtgcgacgatttatttcaaccatcgcccggaaaacgtacgtgatgccagcgtggtcgttgtttccagcgcgatttctgccgataacccggaaattgtcgccgctcatgaagcgcgtattccggtgatccgtcgtgccgaaatgctggctgagttaatgcgttttcgtcatggcatcgccattgccggaacgcacggcaaaacgacaaccaccgcgatggtttccagcatctacgcagaagcggggctcgacccaaccttcgttaacggcgggctggtaaaagcggcgggggttcatgcgcgtttggggcatggtcggtacctgattgccgaagcagatgagagtgatgcaagcttcctgcatctgcaaccgatggtggcgattgtcaccaatatcgaagccgaccacatggatacctaccagggcgactttgagaatttaaaacagacttttattaattttctgcacaacctgccgttttacggtcgtgcggtgatgtgtgttgatgatccggtgatccgcgaattgttaccgcgagtggggcgtcagaccacgacttacggcttcagcgaagatgccgacgtgcgtgtagaagattatcagcagattggcccgcaggggcactttacgctgctgcgccaggacaaagagccgatgcgcgtcaccctgaatgcgccaggtcgtcataacgcgctgaacgccgcagctgcggttgcggttgctacggaagagggcattgacgacgaggctattttgcgggcgcttgaaagcttccaggggactggtcgccgttttgatttcctcggtgaattcccgctggagccagtgaatggtaaaagcggtacggcaatgctggtcgatgactacggccaccacccgacggaagtggacgccaccattaaagcggcgcgcgcaggctggccggataaaaacctggtaatgctgtttcagccgcaccgttttacccgtacgcgcgacctgtatgatgatttcgccaatgtgctgacgcaggttgataccctgttgatgctggaagtgtatccggctggcgaagcgccaattccgggagcggacagccgtagcctgtgtcgcacaattcgtggacgtgggaaaattgatcccattctggtgccggatccggcgcgggtagccgagatgctggcaccggtattaaccggtaacgacctgattctcgttcagggggctggtaatattggaaaaattgcccgttctttagctgaaatcaaactgaagccgcaaactccggaggaagaacaacatgactgataaaatcgcggtcctgttgggtgggacctccgctgagcgggaagtttctctgaattctggcgcagcggtgttagccggactgcgtgaaggcggtattgacgcgtatcctgtcgacccgaaagaagtcgacgtgacgcaactgaagagcatgggctttcagaaagtgtttatcgcgctacacggtcgcggcggtgaagatggtacgctgcaggggatgctcgagctgatgggcttgccttataccggaagcggagtgatggcatctgcgcttagtatggataaactacgcagcaaacttctatggcaaggtgccggtttaccggtcgcgccgtgggtagcgttaacccgcgcagagtttgaaaaaggcctgagcgataagcagttagcagaaatttctgctctgggtttgccggttatcgttaagccgagccgcgaaggttccagtgtgggaatgagtaaagtagtagcagaaaatgctctacaagatgcattaagattggcatttcagcacgatgaagaagtattgattgaaaaatggctaagtgggccggagttcacggttgcgatactcggtgaagaaattttaccgagtatacgtattcaaccgtccggaaccttctatgattatgaggcgaagtatctctctgatgagacacagtatttctgccccgcaggtctggaagcgagtcaagaggccaatttgcaggcattagtgctgaaagcatggacgacgttaggttgcaaaggatggggacgtattgacgttatgctggacagcgatggacagttttatctgctggaagccaataccagtccgggtatgaccagccacagcctggtgccgatggcggcacgtcaggcaggtatgagcttcagccagttggtagtacgaattctggaactggcggactaatatgagccaggctgctctgaacacgcgaaacagcgaagaagaggtttcttctcgccgcaataatggaacgcgtctggcggggatccttttcctgctgaccgttttaacgacagtgttggtgagcggctgggtcgtgttgggctggatggaagatgcgcaacgcctgccgctcagtaagctggtgttgaccggtgaacgccattacacacgtaatgacgatatccggcagagcatcctggcattgggtgagccgggtacctttatgacccaggatgtcaacatcatccagacgcaaatagaacaacgcctgccgtggattaagcaggtgagcgtcagaaagcagtggcctgatgaattgaagattcatctggttgaatatgtgccgattgcgcggtggaatgatcaacatatggtagacgcggaaggaaataccttcagcgtgccgccagaacgcaccagcaagcaggtgcttccaatgctgtatggcccggaaggcagcgccaatgaagtgttgcagggctatcgcgaaatggggcagatgctggcaaaggacagatttactctgaaggaagcggcgatgaccgcgcggcgttcctggcagttgacgctgaataacgatattaagctcaatcttggccggggcgatacgatgaaacgtttggctcgctttgtagaactttatccggttttacagcagcaggcgcaaaccgatggcaaacggattagctacgttgatttgcgttatgactctggagcggcagtaggctgggcgcccttgccgccagaggaatctactcagcaacaaaatcaggcacaggcagaacaacaatgatcaaggcgacggacagaaaactggtagtaggactggagattggtaccgcgaaggttgccgctttagtaggggaagttctgcccgacggtatggtcaatatcattggcgtgggcagctgcccgagccgtggtatggataaaggcggggtgaacgacctcgaatccgtggtcaagtgcgtacaacgcgccattgaccaggcagaattgatggcagattgtcagatctctagcgtatatctggcgctttctggtaagcacatcagctgccagaatgaaattggtatggtgcctatttctgaagaagaagtgacgcaagaagatgtggaaaacgtcgtccataccgcgaaaagcgtgcgtgtgcgcgatgagcatcgtgtgctgcatgtgatcccgcaagagtatgcgattgactatcaggaagggatcaagaatccggtaggacttagcggcgtgcggatgcaggcaaaagtgcacctgatcacatgtcacaacgatatggcgaaaaacatcgtcaaagcggttgaacgttgtgggctgaaagttgaccaactgatatttgccggactggcaagtagttatagcgtattgacggaagatgaacgtgaactgggtgtctgcgtcgtcgatatcggtggtggtacaatggatatcgccgtttataccggtggggcattgcgccacactaaggtaattccttatgctggcaatgtcgtgaccagtgatatcgcttacgcctttggcacgccgccaagcgacgccgaagcgattaaagttcgccacggttgtgcgctgggttccatcgttggaaaagatgagagcgtggaagtgccgagcgtaggtggtcgtccgccacggagtctgcaacgtcagacactggcagaggtgatcgagccgcgctataccgagctgctcaacctggtcaacgaagagatattgcagttgcaggaaaagcttcgccaacaaggggttaaacatcacctggcggcaggcattgtattaaccggtggcgcagcgcagatcgaaggtcttgcagcctgtgctcagcgcgtgtttcatacgcaagtgcgtatcggcgcgccgctgaacattaccggtttaacggattatgctcaggagccgtattatagcacggcggtgggattgcttcactatgggaaagagagtcatcttaacggtgaagctgaagtagaaaaacgtgttacagcaagtgttggcagctggatcaagcgactcaatagttggctgcgaaaagagttttaatttttatgaggccgacgatgattacggcctcaggcgacaggcacaaatcggagagaaactatgtttgaaccaatggaacttaccaatgacgcggtgattaaagtcatcggcgtcggcggcggcggcggtaatgctgttgaacacatggtgcgcgagcgcattgaaggtgttgaattcttcgcggtaaataccgatgcacaagcgctgcgtaaaacagcggttggacagacgattcaaatcggtagcggtatcaccaaaggactgggcgctggcgctaatccagaagttggccgcaatgcggctgatgaggatcgcgatgcattgcgtgcggcgctggaaggtgcagacatggtctttattgctgcgggtatgggtggtggtaccggtacaggtgcagcaccagtcgtcgctgaagtggcaaaagatttgggtatcctgaccgttgctgtcgtcactaagcctttcaactttgaaggcaagaagcgtatggcattcgcggagcaggggatcactgaactgtccaagcatgtggactctctgatcactatcccgaacgacaaactgctgaaagttctgggccgcggtatctccctgctggatgcgtttggcgcagcgaacgatgtactgaaaggcgctgtgcaaggtatcgctgaactgattactcgtccgggtttgatgaacgtggactttgcagacgtacgcaccgtaatgtctgagatgggctacgcaatgatgggttctggcgtggcgagcggtgaagaccgtgcggaagaagctgctgaaatggctatctcttctccgctgctggaagatatcgacctgtctggcgcgcgcggcgtgctggttaacatcacggcgggcttcgacctgcgtctggatgagttcgaaacggtaggtaacaccatccgtgcatttgcttccgacaacgcgactgtggttatcggtacttctcttgacccggatatgaatgacgagctgcgcgtaaccgttgttgcgacaggtatcggcatggacaaacgtcctgaaatcactctggtgaccaataagcaggttcagcagccagtgatggatcgctaccagcagcatgggatggctccgctgacccaggagcagaagccggttgctaaagtcgtgaatgacaatgcgccgcaaactgcgaaagagccggattatctggatatcccagcattcctgcgtaagcaagctgattaagaattgactggaatttgggtttcgaggctctttgtgctaaactggcccgccgaatgtatagtacacttcggttggataggtaatttggcgagataatacgatgatcaaacaaaggacacttaaacgtatcgttcaggcgacgggtgtcggtttacataccggcaagaaagtcaccctgacgttacgccctgcgccggccaacaccggggtcatctatcgtcgcaccgacttgaatccaccggtagatttcccggccgatgccaaatctgtgcgtgataccatgctctgtacgtgtctggtcaacgagcatgatgtacggattagtaccgtagagcacctcaatgctgctctcgcgggcttgggcatcgataacattgttatcgaagttaacgcgccggaaatcccgatcatggacggcagcgccgctccgtttgtatacctgctgcttgacgccggtatcgacgagttgaactgcgccaaaaaatttgttcgcatcaaagagactgttcgtgtcgaagatggcgataagtgggctgaatttaagccgtacaatggttttagcctggatttcaccatcgattttaaccatccggctattgattccagcaaccagcgctatgcgatgaacttctccgctgatgcgtttatgcgccagatcagccgtgcgcgtacgttcggtttcatgcgtgatatcgaatatctgcagtcccgtggtttgtgcctgggcggcagcttcgattgtgccatcgttgttgacgattatcgcgtactgaacgaagacggcctgcgttttgaagacgaatttgtgcgtcacaaaatgctcgatgcgatcggtgacttgttcatgtgtggtcacaatattattggtgcatttaccgcttataaatccggtcatgcactgaataacaaactgctgcaggctgtcctggcgaaacaggaagcctgggaatatgtgaccttccaggacgacgcagaactgccgttggccttcaaagcgcctagtgctgtactggcataacgacatttatactgtcgtataaaattcgactggcaaatctggcactctctccggccaggtgaaccagtcgtttttttttgaattttataagagctataaaaaacggtgcgaacgctgttttcttaagcacttttccgcacaacttatcttcattcgtgctgtggactgcaggctttaatgataagatttgtgcgctaaatacgtttgaatatgatcgggatggcaataacgtgagtggaatactgacgcgctggcgacagtttggtaaacgctacttctggccgcatctcttattagggatggttgcggcgagtttaggtttgcctgcgctcagcaacgccgccgaaccaaacgcgcccgcaaaagcgacaacccgcaaccacgagcctagtgccaaagttaactttggtcaattggccttgctggaagcgaacacacgccgcccgaatagcaactattccgttgattactggcatcaacatgccattcgcacggtaatccgtcatctttctttcgcaatggcaccgcaaacactgcccgttgctgaagaatctttgcctcttcaggcgcaacatcttgcattactggatacgctcagcgcgctgctgacccaggaaggcacgccgtctgaaaagggttatcgcattgattatgcgcattttaccccacaagcaaaattcagcacgcccgtctggataagccaggcgcaaggcatccgtgctggccctcaacgcctcacctaacaacaataaacctttacttcattttattaactccgcaacgcggggcgtttgagattttattatgctaatcaaattgttaactaaagttttcggtagtcgtaacgatcgcaccctgcgccggatgcgcaaagtggtcaacatcatcaatgccatggaaccggagatggaaaaactctccgacgaagaactgaaagggaaaaccgcagagtttcgtgcacgtctggaaaaaggcgaagtgctggaaaatctgatcccggaagctttcgccgtggtacgtgaggcaagtaagcgcgtctttggtatgcgtcacttcgacgttcagttactcggcggtatggttcttaacgaacgctgcatcgccgaaatgcgtaccggtgaaggaaaaaccctgaccgcaacgctgcctgcttacctgaacgcactaaccggtaaaggcgtgcacgtagttaccgtcaacgactacctggcgcaacgtgacgccgaaaacaaccgtccgctgtttgaattccttggcctgactgtcggtatcaacctgccgggcatgccagcaccggcaaagcgcgaagcttacgcagctgacatcacttacggtacgaacaacgaatacggctttgactacctgcgcgacaacatggcgttcagccctgaagaacgtgtacagcgtaaactgcactatgcgctggtggacgaagtggactccatcctgatcgatgaagcgcgtacaccgctgatcatttccggcccggcagaagacagcagcgaaatgtataaacgcgtgaataaaattattccgcacctgatccgtcaggaaaaagaagactccgaaaccttccagggcgaaggccacttcagcgtggacgaaaaatctcgccaggtgaacctgaccgaacgtggtctggtgctgattgaagaactgctggtgaaagagggcatcatggatgaaggggagtctctgtactctccggccaacatcatgctgatgcaccacgtaacggcggcgctgcgcgctcatgcgctgtttacccgtgacgtcgactacatcgttaaagatggtgaagttatcatcgttgacgaacacaccggtcgtaccatgcagggccgtcgctggtccgatggtctgcaccaggctgtggaagcgaaagaaggtgtgcagatccagaacgaaaaccaaacgctggctagcatcaccttccagaactacttccgtctgtatgaaaaactggcggggatgaccggtactgctgataccgaagctttcgaatttagcagtatctacaagctggataccgtcgttgttccgaccaaccgtccaatgattcgtaaagatctgccggacctggtctacatgactgaagcggaaaaaattcaggcgatcattgaagatatcaaagaacgtactgcgaaaggccagccggtgctggtgggtactatctccatcgaaaaaagcgagctggtgagtaacgaactgaccaaagccggtattaagcacaacgtcctgaacgccaaattccacgccaacgaagcggcgattgttgctcaggcaggttatccggctgcggtgactatcgcgaccaatatggcgggtcgtggtacagatattgtgctcggtggtagctggcaggcagaagttgccgcgctggaaaatccgaccgcagagcaaattgaaaaaattaaagccgactggcaggtacgtcacgatgcggtactggaagcaggtggcctgcatatcatcggtaccgagcgtcacgaatcccgtcgtatcgataaccagttgcgcggtcgttctggtcgtcagggggatgctggttcttcccgtttctacctgagcatggaagatgcgctgatgcgtatttttgcttccgaccgagtatccggcatgatgcgtaaactgggtatgaagccaggcgaagccattgaacacccgtgggtgactaaagcgattgccaacgcccagcgtaaagttgaaagccgtaacttcgacattcgtaagcaactgctggaatatgatgacgtggctaacgatcagcgtcgcgccatttactcccagcgtaacgaactgttggatgtcagcgatgtgagcgaaaccattaacagcattcgtgaagatgtgttcaaagcgaccattgatgcctacattccaccacagagcctggaagaaatgtgggatattccggggctgcaggaacgtctgaagaacgatttcgacctcgatttgccaattgccgagtggctggataaagaaccagaactgcatgaagagacgctgcgtgagcgcattctggcgcagtccatcgaagtgtatcagcgtaaagaagaagtggttggtgctgagatgatgcgtcacttcgagaaaggcgtcatgctgcaaacgcttgactccctgtggaaagagcacctggcagcgatggactatctgcgtcagggtatccacctgcgtggctacgcacagaaagatccgaagcaggaatacaaacgtgaaagcttctccatgtttgcagcgatgctggagagcttgaaatatgaagttatcagtacgctgagcaaagttcaggtacgtatgcctgaagaggttgaggagctggaacaacagcgtcgtatggaagccgagcgtttagcgcaaatgcagcagcttagccatcaggatgacgactctgcagccgcagctgcactggcggcgcaaaccggagagcgcaaagtaggacgtaacgatccttgcccgtgcggttctggtaaaaaatacaagcagtgccatggccgcctgcaataaaagctaactgttgaagtaaaaggcgcaggattctgcgccttttttataggtttaagacaatgaaaaagctgcaaattgcggtaggtattattcgcaacgagaacaatgaaatctttataacgcgtcgcgcagcagatgcgcacatggcgaataaactggagtttcccggcggtaaaattgaaatgggtgaaacgccggaacaggcggtggtgcgtgaacttcaggaagaagtcgggattaccccccaacattttagcctatttgaaaaactggaatatgaattcccggacaggcatataacactgtggttttggctggtcgaacgctgggaaggggagccgtggggtaaagaagggcaacccggtgagtggatgagcctggtcggtcttaatgccgatgattttccgccagccaatgaaccggtaattgcgaagcttaaacgtctgtaagtcagataaggcgttttcgccgcatccgacattcgcacacgatgcctgatgcgacgctggcgcgtcttatcaggcctaaagggatttctaactcattgataaatttgtttttgtaggtcggataaggcgttcacgccgcatccgacatttgcacaagatgcctgatgcgacgctgtccgcgtcttatcaggcctacgtgcggcatcagacaaatgtcactgctttggttcttcgctccagtcatcgctttcggaaagatcgccactgctggggattcgtttttcttcagcagcccattctccgaggtcgatcagctgacaacgtttggagcaaaatggccgaaacgggctgatttcaccccacaccaccgttttcccgcaggttgggcaattcaccgtaatagtttcactcatttttactccttagcaacaggccagttcgaaatccagacgttccggtacctgtccgttttcagtgtccagcggcataaaacgaatggcaaaacggctcttatgtccggaaatttgcggataaagctgactatcgaggctcagattcaggcgcagcaagtcggcatcgccaccgttatcctgataaaaaccattcaggctggtttgtttacggaagggggcgctctggcgaattaaatccagcaccatggtaagtgcctgggtgagcgggttcaggctggcaatccaggtttctacctggctgtcgcgctgcgcctggggtagatgcagccaaatgtgcaatgtaggtaaatcaaagctgcaacagccgcctgggatgctcagtcgctgacgcaccagagcaatcaaacgatcttcacgcagaaattgcccgatacgcggcgcggaaattaatacgctccccgccgcttttaactgctgaattaatgcttcaatacggctctggtccacgccaggcacgccaatccaggtctggagtttacgttgctgccggtcaagttctttcaacagctcagtgcggacttcgccgcgctcgaaaacatccagtaattcactgacattacggaagaaatgcagcgcgccagcgtggtcaacgatgggtaaattaacggtgagttgctgaatcaaaaactcaatgcgcagccatgtacgcattttttcatttagtggatgttcaaaaaggacctgggtctgcattacggtttttcctgactgacaaactggctcgcaagctgcaaatagtgtgcgtgcaggcgggcaacatcgcttgcgatagcatccggtgcgccgttattatcaatgacgtcatctgccacggcaaggcgggcttcgcgcgttgcctgagcagcaaggatttgttcgacatgctcgcgagttacatcatcgcgctgcatggtgcgcttaagttgcgtttctgggctgacatccaccacaagcactcgattcgcttttttatacagactgttttctaccagcaatggcacaacccacagtacatagggggaagtagcttgctggatctggtgttgcgtctcttgctgaatcagcggatgcagcagggcgttaagccagtttttctcttccgggttggcgaagatccgctcgcgcaaggcccggcgctgcaatgttccatcagcagcaatcatgttagcgccaaagtgatcagcaatggcatgtagcgcaggtgcacctggttcaaccacctgacgcgcaataatatcggcatcaatgacgttaattccgagatcagcaaacgcattggcaacggtactcttgccactgccaatgcctcccgttaaggcaactatatacctcataatttatattcccgggaattcatcatgattatcaaaacgttaaaaatgagtgcacgaaagcgaaattgatgaaacgttcgctcactatttaccaggtaaatttatgggattgtagcgtaaaaaaagacaatttcgcagtcttgcgccgcattgattagtgcgtatgatagcgtcactggagttgcgctcttacccttatagccattaaccccaggaatccgcacatgcgtattgaagaagatctgaagttaggttttaaagacgttctcatccgccctaaacgctccactcttaaaagccgttccgatgttgaactggaacgtcaattcaccttcaaacatagtggtcagagctggtccggcgtgccgattatcgccgcaaatatggacaccgtaggcacattttctatggcctctgcgctggcttcttttgatattttgactgctgtgcataaacactattctgtcgaagagtggcaagcgtttatcaacaattcttccgctgatgtgctgaaacatgtgatggtttctaccggtacgtctgatgcggatttcgaaaaaactaaacagattctcgacctgaacccggcattaaacttcgtttgtattgacgtggcgaatggttattccgaacacttcgtgcagttcgttgcgaaagcgcgtgaagcgtggccgaccaaaaccatttgtgctggtaacgtagtgactggtgaaatgtgtgaggagcttatcctcagtggtgccgatatcgttaaagttggcattggcccaggttctgtttgtacaactcgcgtcaaaacaggcgtcggttatccgcaactttctgcggtaatcgaatgtgccgatgctgcgcacggtctgggcggaatgatcgtcagcgatggtggctgcaccacgccgggcgatgtggcgaaagcctttggcggcggtgccgatttcgtcatgcttggcggcatgctggcgggccacgaagagagcggcggtcgcatcgttgaggagaacggcgagaaatttatgctgttctacggcatgagctccgagtctgcgatgaaacgtcacgttggcggcgttgcggaatatcgcgcagcagaaggtaaaaccgttaagctgccgctgcgaggcccggttgaaaataccgcgcgagatattttgggcggcctgcgtagtgcttgtacatacgttggggctagtcgcctgaaagagctgaccaagcgcaccacgtttattcgtgtgcaggaacaagaaaaccgcatcttcaacaacctgtaatctcccaacgctggcgtggagcaacacgccagcgttatcccatcccactcatcgcatcgcctaaatggaaaattggcagatacattgccaccaccagcgtaccaataattcctcccgttatgatcagcaacgccggttccagtaaggctgcgaggttatccgccagcgccattgtgttttcccgatgatgatgggcgaggttgtctaacatgagatccagagagccggatgcctctcctgttctcactaattgcaaacagagcgggctaaactcaccggtattttttagcgccagccagatgggttgaccgttactgatatcgtgctggatttgtgtcagaagttgcacccagtacgggcagcgcattgtttctctgacgctctctacgccctgtaaaaaagtaatgcctgcactttgtgtcagcgccagaatcgtaaagatctgcgtgagtttttgtccccgcatcagactacccataatcgggatgcgtaacagcaatttctgccgcactataagccaggtcggtcggcgcatcagcaacttattggctatcgccagcagaaagccgaacaacaccagcagccagctccattcgccactaaagtctgccagcgtcatgatcccctgcgttagtgccggtagtggggtgttgaaggtcttatagatagcggcaaactccggcagaacaaaatgcagcattgccacaaccaccatgattgccatcgctaaaatgatgatgggataacgtaacgcacttttcactttgtcggtcaactgacgctgggctttttgctgacgcgccagttcaaagcagcattcatccagcttaccggtcagttcacccgtgcggatcatcgcctgatagagcggcggaaatacctcactccagggtaataaggcattggaaaaagcaatgccctgttcgagatcgtgcgccaggctttgcagcaacgcttgccattgcttactgggatgctgttccgccagcagagccagcccttcagaaagcgttaaccctgctttgagtagcgtcgccagttgatgaatgacttccgcgcttttatctcctcgccactgcgcagaattgatggcgattcgcttcaggcttagtggggtaaccatctgttgctgtagtgccataagcagtaaagtacggctctctgcccatagcatcccatcttgcgcattgccgtcgccggttatgccatgccagcgccagagttgcttactcgccatgcggcatcctcagtacgcggattaactcttcaaaggtggttaagccttgctctacggccaggcagccgttttcaaaaagcgtacgcatacccgcctgtcgtgcgtgcgtttccaggctttcaacgtcggtattagcggaaataagctgacgaatgaccggcgttatgggcagaacttcaaataaggccgtacgaccataaaaaccgtggtagcaatgtacacaaccgggtgcctgccagtggggcagcgggcttggccatacattgtctggaatgtggatgggctccccttgctgccggcgacaatgtgggcaaagtttgcgtaccagacgctgggctattaccagcgtaagcgcgctacttagcatccagcgggcgacccccatttgctgtaaacgtaccagcgtttcgcaggtggaattagtgtgtagggtagacaacaccaggtgaccagtttgcgccgctttaatagcgatctctgctgtttcgccatcgcggatctctccgatcatgatgacgtcaggatcctggcgcaataacgcacgcaaaacgccctgaaaggtgagtccggcacgcggatggatttgcgtctggtttagtccggctatggggatctcaactggatcttcgacgctacaaatattaatgtcagcggtattcagcttttgcagggcactataaagcgtgaccgttttgccgctgccggtagggccagttaccagcaccagtccctgtggttgttgcaaggcatgagcaaagtccgccagttgtaacggctgcattccaagcgtgttgacatccagtgcctgacccacctgctgtaacaaccttaataccaccttttcaccaccccgacatggtaaggtcgcaatacgaaaactgacggcgtttcctgccagttcgacagtgaattgcccgtcctgcggcaggcgatgttccgcaatatccaggtttcccagcacttttaatctggcggttaatgcgactccggcatccggactaacatccggtaaaggatgcaatacgccgtcgatacgcaagcggatgcggtaggcattgtccgctggttcgatatgaatatcagacgcgcgttgttccagcgcagattgtaacgttcgagttagcaactctgctttgggctgatgcttctcctgaacagctacgggcagtgtctgttgtgtgcgactggcgtgaccttccatttgttggcgcgtccagcaggtgatctcaatacgtttggtggtagcgaaatgcaatgcgtccagtagctcatggctaggtgcatcgactaccgcaacatgaaccacctcttcgctggcatccagcaagactccatgataacgcagacacagggcagtgagctgtggaatattcattgccgctccttagttggcgtcatcaaagcggaagacatcttcgcaggcttgctgcaatgcgctgtcactttgaatattgcagttgcgcgtccagccggtgacgccgtttgcgttatcccaacccggtgtcatgacgacgcttagcccattgagactttcttgcccggtcaggctcaccacgccctttgccacactcatggcactaacatagcgggtggtggtagggctgggaatgccattgctgccaccgtcgcaggtatctaatccaccatgttccagcgcgcacaactctacggcggtacggtaaggcacaaaggtttgtagcatgtcggtgagtgcggctttgcgcaggtagttttgataagcgggaataccaatggcgcttaaaatggcaatgatgccaataaccaccatcagttcgataagtgtaaaaccgcgttgcttgtccatctgtttcgctccttgatttggttggcgctactttggcaaacgccatcagcacaggcgaggggcaaaaaacgaaacgggaaagcagattccgaggttttttatttcgttgcagcgaaagacaagaaatttgcgaggcgttacgaagaaagttggggaaggggagattatccgcccgcgatggagcggataaatctgtcaactattagcgaaaacgcatactaaggtcgagtgcttgtacgtgtttagttagcgcaccgacggagataaagtccacgcccgtttcggcaaattcacgcagtgttttgtcagtgacgttgccagacacttccagtagcgccttgccgttggtgcgtttgacggcttcgcgcatctgttctgtttcgaagttatccagcatgatgatatcggctcctgctttcagggcttcatcaagttcttccagattctctacttcgacttctactggcgcatccgggtgcagccaggacgctttttcgaccgcctggcgcacactgccggaggcaataatatggttttctttgatcaggaaggcatcagaaagccccagacggtgattcgctccgccgccgcaaagtaccgcgtatttcagagcactacgcaggccgggtaaggttttgcgcgtatccaacaactgcgtgttggtgccttccagcaattcgacatagtggcgtaccttactggcaactccactaagggtttgcacaaaattaagcgcagtgcgttcgcccgttaacagcacgcgggatgggccttcaagttcgaacaaggattgattggcattgatgacatcgccgtcatccacatgccagattatggtgacatcgtcgcctgccagttgaataaacacctcttcaacccagcgtttgccgcaaaagacgccattctcgcgggtgatcaccgtggcatgagagcgagaattttccggtaaaagttttgccgtaatatcattgttggcatcgactgttccgcctaaatcttcccgcagcgcctgggccaccgcgccggggatatcgagattaatgcgttccagcagctcgtcacgtcgggtgtcagggttatagcggcgaggcggcatgttaaaactccagatagctaacgaatcataaggtagaaacatgctactctgaaccgggtattagcaccacatataaggagatcctgcatgttgttagaacaggggtggctggttggcgcgcgccgcgttcccagtccacattacgattgccgcccggatgacgaaacacccaccctgctggtggtgcacaatattagcctgccgccaggcgagtttggcggtccgtggatcgacgcattattcactggaactattgatccgcaggcacatcctttctttgctgagatcgcccatttgcgcgtctccgctcactgtttgattcgccgtgatggtgaaatagtccagtatgttcctttcgataaacgtgcatggcatgcgggagcctctcagtatcaggggcgcgaacgctgcaatgatttttctattgggattgagcttgaaggcaccgatacgctggcgtataccgatgcgcagtatcaacagcttgcggcggttacgcgggcactgattgattgctatccggatatcgctaaaaacatgacgggccattgtgatattgcgccggatcggaaaaccgatcccggtcctgcatttgattgggcacggtttcgtgtgctggtcagcaaggagacaacatgacgctatttacaaccttactggtgttaattttcgagcgcctgtttaagttgggcgagcactggcagcttgatcatcgtcttgaagcgttctttcggcgggtgaaacatttttctctcgggcgcacgttaggcatgaccattattgcgatgggcgtgacttttttactgttacgcgcattgcagggagtattgttcaacgttcccacgctactggtgtggctgctgattggtttgctgtgtattggcgcaggtaaagttcgtcttcattatcatgcttatctgacagctgctagtcgtaatgatagccatgcccgtgccacgatggctggcgaactcaccatgattcacggcgtcccggcaggctgcgacgaacgtgagtatttgcgtgagctgcaaaatgcattgctgtggattaactttcgtttttatcttgcaccgctgttctggctgattgtggggggaacctggggacccgttacgctgatggggtatgcgtttttgcgtgcatggcaatactggctggcgcgatatcagacgccgcatcatcgtttacagtccggcattgatgccgtgcttcatgtactggattgggtgccggttcgtcttgcgggtgtggtatatgccttgatcggtcatggtgagaaagcgttaccggcctggtttgctagcctgggtgatttccatactagccagtatcaggtgttaacgcgtctggcgcagttctctctggcgcgtgaaccgcatgtcgataaggtggagacgccgaaggcagcggttagtatggcgaagaaaaccagcttcgtggtcgtggtggtgattgcactactgacgatttacggggcgttggtgtaaagattattgccctcaccctgtacgggtgagggcgtagagagattaatgcgcttttacggctttggcggttttctctttaaacagatagccgatacctaacacgatcagccataccgggatcaggtatacgctaatcgccattcctggggtcatcagcataatcaccagtaccgccgccataaacagcaggcagatccagttacccagcggataaagcagagcagggaagcgagttaccacgccttgttcctgcttggcgcgacggaatttcatatgcgccaggctaatcatcgcccagttgattaccagtgcagataccaccagcgccattaacagtccgaaagcggactctggggcaaggtagttaatcagtacgcacaacgccgttaccagtgcagacaccagaatggtatttactggtacaccacgtttatcgacagacgccagcgcttttggcgcattaccctgttgtgccagaccaaacagcatacggctgttgcaatatacgcagctgttgtacacggagagcgccgcagtcagtaccacgatgttcagcgcattcgccacaaaggtatcgcctaactcgtggaagatcagcacaaacggactggtatcggcggtaacgcgggtccacggcatcagactgagcagaacggctaagctaccaatatagaaaatcaggatgcggtagataacctggttagttgctttcggtatactttgctccgggttatcagcttctgctgcggtgatccccaccagttccagaccaccgaagctgaacatgataatcgccatcatcatcaccagcccggtgaagccgtgcggcaggaaaccaccctgatcccacaggttgctaacggtcgcctgcgggccgccgttgccactgaatagcagccagccgccgaagatgatcatcgctaccaccgcgataactttgataatggcaaaccagaactccatctcgccaaacactttaacgttggtcaggttgatggcgttaatcaccacaaagaatacggcggcagaaacccaggtggggatttccggataccagaactgaatgtatttacccacggcagtcagctcagccatggcaactaaaacgtacagtacccagtagttccagccagaggcgaaaccggcaaaactgccccagtatttataagcaaagtggctaaaggagcctgcgacaggttcttcgaccaccatttcacccagctgacgcatgatcagaaaggcgataaaaccagcaatggcgtaacccaggataatccctggccctgcggactgtattacggaggcgctacccaggaataacccggtccctatcgcgccacccagcgcgataagctgaatatggcggtttttaaggccgcgctttagctgctcgccgtgctgttgaccttccatcatgaaacctcgtgcggtggttgtttttttgatctacgcagtgatgcgtgtgtaagtttgcaattccgtttgttgtattaatttgtttacatcaaagaagtttgaattgttacaaaaagacttccgtcagatcaagaataatggtatgcggcagcgaatgcacccgctttatgcatggttgaagatgagttgcttaaaaagaaaccgtttgtaaagctcagcctcaacccctctcaatatgtagaatgaatttaaattcgttttaattgaattaaaaatcacaaaattggtaagtgaatcggttcaattcggatttttatagtttaataatcgttaaaaaactcctttcctacgtaaagtctacatttgtgcatagttacaactttgaaacgttatatatgtcaagttgttaaaatgtgcacagtttcatgatttcaatcaaaacctgtatggacataaggtgaatactttgttactttagcgtcacagacatgaaattggtaagaccaattgacttcggcaagtggcttaagacaggaactcatggcctacagcaaaatccgccaaccaaaactctccgatgtgattgagcagcaactggagtttttgatcctcgaaggcactctccgcccgggcgaaaaactcccaccggaacgcgaactggcaaaacagtttgacgtctcccgtccctccttgcgtgaggcgattcaacgtctcgaagcgaagggcttgttgcttcgtcgccagggtggcggcacttttgtccagagcagcctatggcaaagcttcagcgatccgctggtggagctgctctccgaccatcctgagagtcagtatgacttgctcgaaacacgacacgccctggaaggtatcgccgcttattacgccgcgctgcgtagtaccgatgaagacaaggaacgcatccgtgaactccaccacgccatagagctggcgcagcagtctggcgatctggacgcggaaagtaacgccgtactccagtatcagattgccgtcaccgaagcggcccacaatgtggttctgcttcatctgctaaggtgtatggagccgatgttggcccagaatgtccgccagaacttcgaattgctctatagccgtcgcgagatgctgccgctggtgagtagtcaccgcacccgcatatttgaagcgattatggccggtaagccggaagaagcgcgcgaagcaagccatcgccatctggcctttatcgaagaaattttgctcgacagaagtcgtgaagagagccgccgtgagcgttctctgcgtcgtctggagcaacgaaagaattaatgatttttctggtaaaaattatccagaagatgttgtaaatcaagcgcatataaaagcgcggcaactaaacgtagaacctgtcttattgagctttccggcgagagttcaatgggacaggttccagaaaactcaacgttattagatagataaggaataacccatgagtgaacgtttcccaaatgacgtggatccgatcgaaactcgcgactggctccaggcgatcgaaagcgtcatccgtgaagaaggtgttgagcgtgctcagtatctgatcgaccaactgcttgctgaagcccgcaaaggcggtgtaaacgtagccgcaggcacaggtatcagcaactacatcaacaccatccccgttgaagaacaaccggagtatccgggtaatctggaactggaacgccgtattcgtagtgctatccgctggaacgccatcatgacggtgctgcgtgcgagcaaaaaagacctcgaactgggcggccatatggcgtccttccagtcttccgcaaccatttatgatgtgtgctttaaccacttcttccgtgcacgcaacgagcaggatggcggcgacctggtttacttccagggccacatctccccgggcgtgtacgctcgtgctttcctggaaggtcgtctgactcaggagcagctggataacttccgtcaggaagttcacggcaatggcctctcttcctatccgcacccgaaactgatgccggaattctggcagttcccgaccgtatctatgggtctgggtccgattggtgctatttaccaggctaaattcctgaaatatctggaacaccgtggcctgaaagatacctctaaacaaaccgtttacgcgttcctcggtgacggtgaaatggacgaaccggaatccaaaggtgcgatcaccatcgctacccgtgaaaaactggataacctggtcttcgttatcaactgtaacctgcagcgtcttgacggcccggtcaccggtaacggcaagatcatcaacgaactggaaggcatcttcgaaggtgctggctggaacgtgatcaaagtgatgtggggtagccgttgggatgaactgctgcgtaaggataccagcggtaaactgatccagctgatgaacgaaaccgttgacggcgactaccagaccttcaaaagcaaagatggtgcgtacgttcgtgaacacttcttcggtaaatatcctgaaaccgcagcactggttgcagactggactgacgagcagatctgggcactgaaccgtggtggtcacgatccgaagaaaatctacgctgcattcaagaaagcgcaggaaaccaaaggcaaagcgacagtaatccttgctcataccattaaaggttacggcatgggcgacgcggctgaaggtaaaaacatcgcgcaccaggttaagaaaatgaacatggacggtgtgcgtcatatccgcgaccgtttcaatgtgccggtgtctgatgcagatatcgaaaaactgccgtacatcaccttcccggaaggttctgaagagcatacctatctgcacgctcagcgtcagaaactgcacggttatctgccaagccgtcagccgaacttcaccgagaagcttgagctgccgagcctgcaagacttcggcgcgctgttggaagagcagagcaaagagatctctaccactatcgctttcgttcgtgctctgaacgtgatgctgaagaacaagagcatcaaagatcgtctggtaccgatcatcgccgacgaagcgcgtactttcggtatggaaggtctgttccgtcagattggtatttacagcccgaacggtcagcagtacaccccgcaggaccgcgagcaggttgcttactataaagaagacgagaaaggtcagattctgcaggaagggatcaacgagctgggcgcaggttgttcctggctggcagcggcgacctcttacagcaccaacaatctgccgatgatcccgttctacatctattacagcatgttcggcttccagcgtattggcgatctgtgctgggcggctggcgaccagcaagcgcgtggcttcctgatcggcggtacttccggtcgtaccaccctgaacggcgaaggtctgcagcacgaagatggtcacagccacattcagagcctgactatcccgaactgtatctcttacgacccggcttacgcttacgaagttgctgtcatcatgcatgacggtctggagcgtatgtacggtgaaaaacaagagaacgtttactactacatcactacgctgaacgaaaactaccacatgccggcaatgccggaaggtgctgaggaaggtatccgtaaaggtatctacaaactcgaaactattgaaggtagcaaaggtaaagttcagctgctcggctccggttctatcctgcgtcacgtccgtgaagcagctgagatcctggcgaaagattacggcgtaggttctgacgtttatagcgtgacctccttcaccgagctggcgcgtgatggtcaggattgtgaacgctggaacatgctgcacccgctggaaactccgcgcgttccgtatatcgctcaggtgatgaacgacgctccggcagtggcatctaccgactatatgaaactgttcgctgagcaggtccgtacttacgtaccggctgacgactaccgcgtactgggtactgatggcttcggtcgttccgacagccgtgagaacctgcgtcaccacttcgaagttgatgcttcttatgtcgtggttgcggcgctgggcgaactggctaaacgtggcgaaatcgataagaaagtggttgctgacgcaatcgccaaattcaacatcgatgcagataaagttaacccgcgtctggcgtaagaggtaaaagaataatggctatcgaaatcaaagtaccggacatcggggctgatgaagttgaaatcaccgagatcctggtcaaagtgggcgacaaagttgaagccgaacagagcctgatcaccgtagaaggcgacaaagcctctatggaagttccgtctccgcaggcgggtatcgttaaagagatcaaagtctctgttggcgataaaacccagaccggcgcactgattatgattttcgattccgccgacggtgcagcagacgctgcacctgctcaggcagaagagaagaaagaagcagctccggcagcagcaccagcggctgcggcggcaaaagacgttaacgttccggatatcggcagcgacgaagttgaagtgaccgaaatcctggtgaaagttggcgataaagttgaagctgaacagagcctgatcaccgtagaaggcgacaaggcttctatggaagttccggctccgtttgctggcaccgtgaaagagatcaaagtgaacgtgggtgacaaagtgtctaccggcagcctgattatggtcttcgaagtcgcgggtgaagcaggcgcggcagctccggccgctaaacaggaagcagctccggcagcggcccctgcaccagcggctggcgtgaaagaagttaacgttccggatatcggcggtgacgaagttgaagtgactgaagtgatggtgaaagtgggcgacaaagttgccgctgaacagagtctgatcaccgtagaaggcgacaaagcttctatggaagttccggcgccgtttgcaggcgtcgtgaaggaactgaaagtcaacgttggcgataaagtgaaaactggcagcctgattatgatcttcgaagttgaaggcgcagcgcctgcggcagctcctgcgaaacaggaagcggcagcgccggcaccggcagcaaaagctgaagccccggcagcagcaccagctgcgaaagcggaaggcaaatctgaatttgctgaaaacgacgcttatgttcacgcgactccgctgatccgccgtctggcacgcgagtttggtgttaaccttgcgaaagtgaagggcactggccgtaaaggtcgtatcctgcgcgaagacgttcaggcttacgtgaaagaagctatcaaacgtgcagaagcagctccggcagcgactggcggtggtatccctggcatgctgccgtggccgaaggtggacttcagcaagtttggtgaaatcgaagaagtggaactgggccgcatccagaaaatctctggtgcgaacctgagccgtaactgggtaatgatcccgcatgttactcacttcgacaaaaccgatatcaccgagttggaagcgttccgtaaacagcagaacgaagaagcggcgaaacgtaagctggatgtgaagatcaccccggttgtcttcatcatgaaagccgttgctgcagctcttgagcagatgcctcgcttcaatagtagcctgagcgaagacggtcagcgtctgaccctgaagaaatacatcaacatcggtgtggcggtggataccccgaacggtctggttgttccggtattcaaagacgtcaacaagaaaggcatcatcgagctgtctcgcgagctgatgactatttctaagaaagcgcgtgacggtaagctgactgcgggcgaaatgcagggcggttgcttcaccatctccagcatcggcggcctgggtactacccacttcgcgccgattgtgaacgcgccggaagtggctatcctcggcgtttccaagtccgcgatggagccggtgtggaatggtaaagagttcgtgccgcgtctgatgctgccgatttctctctccttcgaccaccgcgtgatcgacggtgctgatggtgcccgtttcattaccatcattaacaacacgctgtctgacattcgccgtctggtgatgtaagtaaaagagccggcccaacggccggcttttttctggtaatctcatgaatgtattgaggttattagcgaatagacaaatcggttgccgtttgttgtttaaaaattgttaacaattttgtaaaataccgacggatagaacgacccggtggtggttagggtattacttcacataccctatggatttctgggtgcagcaaggtagcaagcgccagaatccccaggagcttacataagtaagtgactggggtgagggcgtgaagctaacgccgctgcggcctgaaagacgacgggtatgaccgccggagataaatatatagaggtcatgatgagtactgaaatcaaaactcaggtcgtggtacttggggcaggccccgcaggttactccgctgccttccgttgcgctgatttaggtctggaaaccgtaatcgtagaacgttacaacacccttggcggtgtttgcctgaacgtcggctgtatcccttctaaagcactgctgcacgtagcaaaagttatcgaagaagccaaagcgctggctgaacacggtatcgtcttcggcgaaccgaaaaccgatatcgacaagattcgtacctggaaagagaaagtgatcaatcagctgaccggtggtctggctggtatggcgaaaggccgcaaagtcaaagtggtcaacggtctgggtaaattcaccggggctaacaccctggaagttgaaggtgagaacggcaaaaccgtgatcaacttcgacaacgcgatcattgcagcgggttctcgcccgatccaactgccgtttattccgcatgaagatccgcgtatctgggactccactgacgcgctggaactgaaagaagtaccagaacgcctgctggtaatgggtggcggtatcatcggtctggaaatgggcaccgtttaccacgcgctgggtagtcagattgacgtggttgaaatgttcgaccaggttatcccggcagctgacaaagacatcgttaaagtcttcaccaagcgtatcagcaagaaattcaacctgatgctggaaaccaaagttaccgccgttgaagcgaaagaagacggcatttatgtgacgatggaaggcaaaaaagcacccgctgaaccgcagcgttacgacgccgtgctggtagcgattggtcgtgtgccgaacggtaaaaacctcgacgcaggcaaagcaggcgtggaagttgacgaccgtggtttcatccgcgttgacaaacagctgcgtaccaacgtaccgcacatctttgctatcggcgatatcgtcggtcaaccgatgctggcacacaaaggtgttcacgaaggtcacgttgccgctgaagttatcgccggtaagaaacactacttcgatccgaaagttatcccgtccatcgcctataccgaaccagaagttgcatgggtgggtctgactgagaaagaagcgaaagagaaaggcatcagctatgaaaccgccaccttcccgtgggctgcttctggtcgtgctatcgcttccgactgcgcagacggtatgaccaagctgattttcgacaaagaatctcaccgtgtgatcggtggtgcgattgtcggtactaacggcggcgagctgctgggtgaaatcggcctggcaatcgaaatgggttgtgatgctgaagacatcgcactgaccatccacgcgcacccgactctgcacgagtctgtgggcctggcggcagaagtgttcgaaggtagcattaccgacctgccgaacccgaaagcgaagaagaagtaatttttcgtttgccggaacatccggcaattaaaaaagcggctaaccacgccgctttttttacgtctgcaatttacctttccagtcttcttgctccacgttcagagagacgttcgcatactgcactccgttgctcgttattcagcctgacagtatggttactgtcgtttagacgttgtgggcggctctcctgaactttctcccgaaaaacctgacgttgttcaggacttgcgctttgaacacgctggcgggcgttatcacgttgctgttgattcagtgggcgctgctgtactttttccttaaacacctggcgctgctctggacttgcggactgaatacgctcacgcgctgcgtctcttcgctgctggttctgcgggttagtctgcattttctcgcgaaccgcctggcgctgctcagggctggcggactgaatgcgctcacgcgctgcctctcttcgctgctggatcttcgggttagtctgcattctctcgcgaactgcctggcgctgctcagggctggcggactgataacgctgacgagcggcgtccttttgttgctgggtcagtggttggcgacggctgaagtcgtggaagtcgtcatagctcccatagtgttcagcttcattaaaccgctgtgccgctgcctgacgttgggtatctcgtgtaatgactggtgcggcgtgtgttcgttgctgaaactgatttgctgccgcctgacgctggctgtcgcgcgttggggcaggtaattgcgtggcgctcattccgccgttgacatcggtttgatgaaaccgctttgccatatcctgatcatgatagggcacaccattacggtagtttggattgtgccgccatgccatattcttatcagtaagatgctcaccggtgatacggttgaaattgttgacgtcgatattgatgttgtcgccgttgtgttgccagccattaccgtcacgatgaccgccatcgtggtgatgataatcatcattgtcatgatgatgatggtcatgatcgtcgtcgtcccagtcgatgctgctgaatagtgcgtacgtggtagcaacgcccatgctatagccgaatccgcgtacaaagctgtcaacaaacggttctccggctggtggtggcagataaaccggcggatacgcagtattggcccagttcccgtaaaccacggttgggttgtagttgggaatatagaccacatcaggattggcgggctcaatggaaatgacggttgttgccggctctgtaatgacggggttggcagttaaaactgtattggatggtatgacgggtgccgtgactgtctgttttaccggtacagctttcttcgttgtggtaataactttctgttcggtactactcttcaggctgccggtttgttgcgccagttgccgcaatcgctgtacgctgtccatcacgtcctgcggctgggccagaaaagcatcgcccaggttttgcacccattgcgggttttcgcccatcaatgccatcaattgtggaaaggccaccagacttttaacgctggcgtcccacggctggtcagataccgcctgaatagcagcatcgccttgtttaagtggattatcgtggctccattgcactgcttgagcaacgtttgtcggataggtacttgccatcagcacctggctaagtagggcgtcgggatacagcgcgacgggcgcgacccattgatctatttgtgcagtgctgaatgcggatttgacgacggcgggtgttacgggaggtgcggaaaccgttgcaggaaacgtaaccgcggcagcgtcagacacagccagttgtgtgctttgcggttccacaggcgcttccactgtgcggctttttatatatagcccggtagaggcggcacaaagcccggcactgcaaattagcgccagcacatggggtttaaacggcaaagtcattttcataattcggatctcaaggaaatcgcaatggtcggcgaactgccacccgcaggtgctgtgaatccgagtataaagaggcggtagtttaaattttgactaatcttgggattcgttgagaaaggtgattatcaccatgcgaattaacgaagtttttacggagggaaacaatctctagaccatccttaacgattcagccacttttttatgttgcttttttgtaaacagattaacacctcgtcaaaatcctgctattctgcccgttgcggtactgggcatttaccctacaaactgctgtctcacaggagcgtgaagagaatcgcctgccgcactatgacaatgagagcgaggagaaccgtcgtgctagaagaataccgtaagcacgtagctgagcgtgccgctgaggggattgcgcccaaacccctggatgcaaaccaaatggccgcacttgtagagctgctgaaaaacccgcccgcgggcgaagaagaattcctgttagatctgttaaccaaccgtgttcccccaggcgtcgatgaagccgcctatgtcaaagcaggcttcctggctgctatcgcgaaaggcgaagccaaatcccctctgctgactccggaaaaagccatcgaactgctgggcaccatgcagggtggttacaacattcatccgctgatcgacgcgctggatgatgccaaactggcacctattgctgccaaagcactttctcacacgctgctgatgttcgataacttctatgacgtagaagagaaagcgaaagcaggcaacgaatatgcgaagcaggttatgcagtcctgggcggatgccgaatggttcctgaatcgcccggcgctggctgaaaaactgaccgttactgtcttcaaagtcactggcgaaactaacaccgatgacctttctccggcaccggatgcgtggagtcgcccggatatcccactgcacgcgctggcgatgctgaaaaacgcccgtgaaggtattgagccagaccagcctggtgttgttggtccgatcaagcaaatcgaagctctgcaacagaaaggtttcccgctggcgtacgtcggtgacgttgtgggtacgggttctagccgtaaatccgccactaactccgttctgtggtttatgggcgatgatattccacatgtgccgaacaaacgcggcggtggtttgtgcctcggcggtaaaattgcacccatcttctttaacacgatggaagacgcgggtgcactgccaatcgaagtcgacgtctctaacctgaacatgggcgacgtgattgacgtttacccgtacaaaggtgaagtgcgtaaccacgaaaccggcgaactgctggcgaccttcgaactgaaaaccgacgtgctgattgatgaagtgcgtgctggtggccgtattccgctgattatcgggcgtggcctgaccaccaaagcgcgtgaagcacttggtctgccgcacagtgatgtgttccgtcaggcgaaagatgtcgctgagagcgatcgcggcttcagcctggcgcaaaaaatggtaggccgtgcctgtggcgtgaaaggcattcgtccgggcgcgtactgtgaaccgaaaatgacttctgtaggttcccaggacaccaccggcccgatgacccgtgatgaactgaaagacctggcgtgcctgggcttcagcgctgacctggtgatgcagtctttctgccacaccgcggcgtatccgaagccagttgacgtgaacacgcaccacacgctgccggacttcattatgaaccgtggcggtgtgagcctgcgtccgggtgacggcgtcattcactcctggctgaaccgtatgctgctgccggataccgtcggtaccggtggtgactcccatacccgtttcccgatcggtatctctttcccggcgggttctggtctggtggcgtttgctgccgcaactggcgtaatgccgcttgatatgccggaatccgttctggtgcgcttcaaaggcaaaatgcagccgggcatcaccctgcgcgatctggtacacgctattccgctgtatgcgatcaaacaaggtctgctgaccgttgagaagaaaggcaagaaaaacatcttctctggccgcatcctggaaattgaaggtctgccggatctgaaagttgagcaggcctttgagctaaccgatgcgtccgccgagcgttctgccgctggttgtaccatcaagctgaacaaagaaccgatcatcgaatacctgaactctaacatcgtcctgctgaagtggatgatcgcggaaggttacggcgatcgtcgtaccctggaacgtcgtattcagggcatggaaaaatggctggcgaatcctgagctgctggaagccgatgcagatgcggaatacgcggcagtgatcgacatcgatctggcggatattaaagagccaatcctgtgtgctccgaacgacccggatgacgcgcgtccgctgtctgcggtacagggtgagaagatcgacgaagtgtttatcggttcctgcatgaccaacatcggtcacttccgtgctgcgggtaaactgctggatgcgcataaaggtcagttgccgacccgcctgtgggtggcaccgccaacccgtatggacgccgcacagttgaccgaagaaggctactacagcgtcttcggtaagagtggtgcgcgtatcgagatccctggctgttccctgtgtatgggtaaccaggcgcgtgtggcggacggtgcaacggtggtttccacctctacccgtaacttcccgaaccgtctgggtactggcgcgaatgtcttcctggcttctgcggaactggcggctgttgcggcgctgattggcaaactgccgacgccggaagagtaccagacctacgtggcgcaggtagataaaacagccgttgatacttaccgttatctgaacttcaaccagctttctcagtacaccgagaaagccgatggggtgattttccagactgcggtttaaaaagtcagcgcacgcgctgcgcataaacgacacaatgcccggtgaatgagattcccgggcatttttttatttctaaaccatcgccgttccgctgtttttctccggtaaggctgcgataattacatcaatggcgcaatgcgatttcggtgcattgccgggagcagaggaacacactatggattacgaatttctgcgcgatattaccggagtggtaaaggtgcgtatgtccatggggcatgaagtggtcgggcactggtttaatgaagaggtgaaagaaaacctggccttgcttgatgaagtggaacaagcagcgcacgcactgaaaggtagcgaacggtcctggcaacgggcagggcatgaatacaccctgtggatggacggtgaagaggtgatggttcgcgccaatcaactggaattcgctggcgatgaaatggaagaggggatgaactactacgacgaagaaagcctgagcctatgcggcgttgaggattttctgcaggtcgtggcggcttaccgcaatttcgtgcagcagaagtaaataaatctggcggagcctgggagctccgccagagccgttaaacagctggcatattgcgcccgtaataaatctcgcgcatttctttccacagcgcagcggtaatttcctggcgctcgctgtcggttaagtcttccggtttggtgtggaacatgtagtgcttaaggtcgaactctttaagcaacatcttggtatggaagatattttcctgatagacgttcacatccaccatgtcatacagcgccttcatatcgtcagacataaagttctgaatgctattaatctcatggtcgataaagtgcttcataccgttaatgtcgcgggtaaaaccgcgcacgcgataatcaatggttacgatatcggactcaagctggtggatcaggtaattcagcgccttcagcggagaaatcacgccgcaggtagagacttcaatatcggcgcggaaggtacataaaccgccttcaggatgactttccgggtaggtatgtacgcaaatatgacttttatcaagatgggcaacgaccgtttctggcagtgggccggggtgttctgttttgtcgatgagtttcgggtcaaccggttcttcactcaccagaatagtgacgctggcaccctgtggttcgtaatcctggcgggcgatgttaagaatattagccccgataatggaacaggtttcactcaggatttcggtcagacggttggcattatagagttcatcgatataagcaatataaccgtcgcgctcttcggcagttttggcgtagcagatatcgtaaatacaaaaactcagacttttggtcagattattaaagccatgcagtttcagttttttcaatttcttatcttctccttaggacggctgactagccagtgcgtcttgcagatactgaggtaaggcaaaagctgccgtatggattgccggattgtaataacggcatttcaggccagaggcgagaaaacgcgcctgaataatttcggtactgagatggcgtaaggcgtcgttatctgtcgcccatgcaaaagtcatgataccgccgtaataggtcgggatcgccgcctgataaaagccaacgtcgctgaagtaatggctgagtttgcgatggctgtcgatggcttcttcctgctgtaaaaagcagacgccgttttgtgcgacgaagataccgccaggattcaggcaacgtttgcagccttcataaaatgcgctagtgaaaaggctttcgccgggaccgataggatcggtgcagtcggagataatgacatcaaaggtctggctggtttgattaacgaaattgacgccatcgtcgatcaccagcttaaagcgcggatcgtcgtagctaccggcgttatggttgggtagatactgacggcagaagcttacgacacccgcatcgatttccaccatcgtgatactctcaacgtttttatgtcgggttacttcacgcagcatggcaccgtcgccgccgccgataatcagcacatgtttcgcgtgaccatgggccagtagcggaacatgggtcatcatctcatgatagataaactcgtcgcgctcggtggtttgtactacgccatccagcgccattacgcgaccaaatgcagcgttctcaaaaatgatcagatcctggtgatcggtcttttcatgatacagaacgttatctaccgcaaagtactgcccaaactggtcgtgtagcgtttcatgccactgttttttttcggccatgggttgatacctcctttgttaacacccgtaaaaaaagggcgcaacataatagctaacattgaccgcggatgcacggtcaatatttctacaaaaaggtatcagggattatttgacgtaggcaagcaggcttaaggaatcgcgggccagggctttgcattttttagcgacgggaatgccaatgccgctgagatcgcggtagctgtcttcaccgagggctttcatgtcgaaggtgtcgtaattactgaggtcccactggttttgctgagcgaaaaagaccagtgcgcgacgaatttgcccgttaggtaagttctggtaaccacaatcgttcttcagaaagacaaaaactgccgttaaatcggccatatcttcggcttcagactcgctgagcgcgtaactgtttgcgcagacggccatcaggctgccgaataacactgttctgaaaaacgtcttcattgcttctaccaggggcttaaagaagataaacgttagcacactgcgagcgaggcgacgaccattattgtcgattaaattgtgtctgcggcttgaccttcccgtaaggggaaggactatgctcaacgtttgattttgtttcgcctgcttaagaataaggaaataactatgcaacgtcgtgatttcttaaaatattccgtcgcgctgggtgtggctagcgctttgccgctgtggagccgcgcagtatttgcggcagaacgcccaacgttaccgatccctgatttgctcacgaccgatgcccgtaatcgcattcagttaactattggcgcaggccagtccacctttggcgggaaaactgcaactacctggggctataacggcaatctgctggggccggcggtgaaattacagcgcggcaaagcggtaacggttgatatctacaaccaactgacggaagagacaacgttgcactggcacgggctggaagtaccgggtgaagtcgacggcggcccgcagggaattattccgccaggtggcaagcgcagcgtgacgttgaccgttgatcaacctgccgctacctgctggttccatccgcatcagcacggcaaaaccgggcgacaggtggcgatggggctggctgggctggtggtgattgaagatgacgagatcctgaaattaatgctgccaaaacagtggggtatcgatgatgttccggtgatcgttcaggataagaaatttagcgccgacgggcagattgattatcaactggatgtgatgaccgccgccgtgggctggtttggcgatacgttgctgaccaacggtgcaatctacccgcaacacgctgccccgcgtggttggctgcgcctgcgtttgctcaatggctgtaatgcccgtagcctcaatttcgccaccagcgacaatcgcccgctgtatgtgattgccagcgacggtggtctgctacctgaaccagtgaaggtgagcgaactgccggtgctgatgggcgagcgttttgaagtgctggtggaggttaacgataacaaatcctttgacctggtgacgctgccggtcagccagatggggatggcgattgcgccgtttgataagcctcatccggtaatgcggattcagccgattgctattagtgcctccggtgctttgccagacacattaagtagcctgcctgcgttacctagcctggaagggctgacggtacgcaagctgcaactctctatggacccgatgctcgatatgatggggatgcagatgctaatggagaaatatggcgatcaggcgatggccgggatggatcacagccagatgatgggccatatggggcacggcaatatgaatcatatgaaccacggcgggaagttcgatttccaccatgccaacaaaatcaacggtcaggcgtttgatatgaacaagccgatgtttgcggcggcgaaagggcaatacgaacgttgggttatctctggcgtgggcgacatgatgctgcatccgttccatatccacggcacgcagttccgtatcttgagtgaaaatggcaaaccgccagcggctcatcgcgcgggctggaaagataccgttaaggtagaaggtaatgtcagcgaagtgctggtgaagtttaatcacgatgcaccgaaagaacatgcttatatggcgcactgccatctgctggagcatgaagatacggggatgatgttagggtttacggtataaaaagaccgtattcggaaatatgcccggatctctccgggcattaaactgatgacaaacgcaaatctgcctgatgcgctacgcttatcaggcctacgctagctgtgcaatccattgattttgcacaattttgtaggctggataaggcgttcacgccgcatccggcatgaacaacgcgcacgttgtcagcaatctgagcaagtcttacttcacatcatccggcagcgcataagccacaatatagtcgcccatcttcgtaccaaaactaccgtgaccgcctgcggagatcaccacatactgcttaccattcacttcataggtcattggcgtagcctgaccacccgctggtaaacgaccctgccacagtttttcaccgttgctcatgttgtaagcgcgcaggtagttatctgccgtagcggcgataaacagcacgttacccgccgtggagattggcccgcccagcatcggcatacccatattgaacggcaccggaaccggcatcgggaacggcatactgtcctgcggcgtaccaatacgtttcttccacaccacttcattagttttcagatccagcgcgctgatataaccccatgctggctgtttacatggcagaccaaatggactgaggaacgggttgagcgtgacaccatacggtacaccgtactgtggctgaatgccggattccgtacccgtgcctttggcatctttcggctgctccatcgggttgccaggaccacgcgggatcagtttgctaacaaacggcagtgccattgggttggcaatcgccacttcacgatttggatcaacggaaatcccgccccattcgaacatccccaggttacccgggaagaccagcgtaccctgttcagatggcggggtgaaaatgccttcatagcgcatctggtggaacatcacgcggcacaccagttggtcaaacatggtggctccccacatatccgcaccgctcaaatctttcgtcggacggaagctcagttcagaaaacggttgagttggggttacgtaatcgcctttcgctgcaccttggggaaccggtttttccggtgccggaaccaccagttcgccattacgacgatcgagcacaaaaatgttgccggttttcgccggagcgtaaataactggcactttctgaccattaacggtgatgtccgccagcgtcggctgtgccggaagatccatgtcccacaggtcgtggtgaacggtctggtagctccacgccagtttcccggtagtggcattcagcgccagaatgctgctggcataacgttcctgttccggtgtgcggttaccgccccagatatccggcgtggtcacgcccatcggcagatagaccagatccagcttcgcgtcataggccgctggtgcccaggagtttgggctgttaaaggtaaaggtgtgttcgtcagacgggattgcgttcggatctttcgcgccgggatcaaaagcccacagcagctccccggtgttgacatcaaaaccacggatcacgccagacgtttcgcgggtactgaagttatcggtaacactaccggccatcacgatggttttatcggtgataatcggtgggctagtcggttcatacagacccggtttggtgtctggcatattgctttgcagattgagcacgcctttattggcgaaggtttcgcacagtttgccgttttcagcgttaatcgcaatcagtcgaccatcattgaccggaagaatgatacgacgcgggcaatccgccatcacttccgggctagcggtttctgctttggcttcatgataagagacaccacggcaggttacgtgctggaaagactcgttggttttcagctcaggatcgtaatgccatttctctttgccgctggcggcatcaagcgcaaacaggcgctggtgagcggtacacaggtaaagggtgtcgcccactttaatcggcgtcacttcattggtgatttcacccggatcgttcggctgcttcacatcgccagtacggaacacccaggcttctttcagattatggacgttatcggcgttaatttgtttcagcgggctaaagcgttgaccttcctgattacgaccataggcaggccagtcctgatcggctacgggggagatagcttcagcaggtgtggcatcggcgcttaaggtgccgttgatctcctgcggatcgttaaatccggcccaggtcaggataccaccgctaatcagcagtgcgaccaccagtgcggcaactgcgccgctggcaggaatgaccaggcgacgccagacaaacggcaggatcagccagatgccgaagaagaccagaatgtcgctgcgcggagtcagcgcccagaagtcgaaaccaacttcccagacgccccaaatcatggtgccgagcagcagggctgcgtatagccaaagcgcggcgcgtttactgcgccacagcatccaggcgacgccgagcatcacaaggccagcgatagggtagtaccaggagccgccaatcgcgaccagccagcctccgccaatgagtagatacagcccgcaaagcgctgcaaaaagggctgttagcgtgacgagtaatcgtcggctgcctgtattgttaattgccataaagagacaccatttcaattcattaatattttagtagcaattaattataggttttaacatgtgtgatcgtcatcacaattcgagctttattaacagattccgcgaatgaatagttttactggtatactgcgtgtcttgcgctttgttgcggtgccaaaacctgcccgtgcgaagtgatttgtttttaaatcatatggttagagatatgaaacatactgtagaagtaatgatccccgaagcggagattaaagcgcgtatcgccgaactgggtcgtcagattactgagcgttacaaagacagcggcagcgatatggtgctggtgggtctgctgcgtggcagttttatgtttatggcggacctgtgccgtgaagttcaggtatctcatgaagtcgactttatgaccgcctccagctacggtagcggcatgtccaccacccgtgatgtgaaaatcctcaaagatctggatgaagatatccgtggcaaggacgtgctgattgttgaagatatcatcgacagcgggaatacactgagcaaagtgcgtgagatcttaagcctgcgcgaaccgaagagcctggcgatttgtacgctgctggataaaccgtcccgtcgtgaagtgaacgtcccggtagaatttatcggtttcagcatcccggatgagtttgtggtgggttacggcattgattacgcacagcgttaccgtcatctgccgtatatcggcaaagtgattctgctggacgagtaagtgtgaagttgccggatgtgttgcatccggcatggcatttttatttgtggttggcgtgtttcagcttgaggttggaaatcccgtgacggtaacgttgctcaagggtttcgcggttggtggcggtaacatccagatcacgcagcaagccgtcgtgaatgccgtaggcccagccgtgaatggtaactttctgcccgcgtttccacgcactttgcataatggtggagtggcccaggttatacacctgttccatgacgttcagttcacacaaggtatccagacggcgctcttgcggcatttcgccgagcaaactgctatgtttgaaccagatatcgcggatatgcagcagccagttgttgataagccccagttccgggttttcaactgcggcttgtacgccgccgcaaccgtagtggccacagataataatgtgttcaacttcgagtacatccactgcatactgaaccacggaaaggcagttcaggtcagtgtgaatgaccaggttagcaacattacggtgaacaaagagttcgcccggttcaagaccggttaaacgttctgcaggaacgcgactgtcggaacatccaatccatagaaagcgcggtttttgcgcttgtgccagtttctcaaaaaacccgggatcctcttccaccagcattttactccatagtgcattgttgctgatgagtgtatctatgtctttcatggaggttaacgacctgtaaccaaataattacgtttggctaatatagggcaactccgggacgatttaaaccacagataaagtgtaagaacgtaaggtaagtaaaaatttatgaccattgcactggaacttcaacagcttaaaaaaacctatccaggcggcgttcaggcgcttcgtgggatagatttgcaggtcgaagcgggtgatttttatgcgcttctcgggccgaacggggccgggaaaagcaccactatcggtattatcagctctctggtaaataaaacctccgggcgggtcagcgtatttggttacgatctcgagaaggatgtcgtgaacgctaaacgtcagttgggactggtgccgcaggaatttaacttcaacccgtttgaaaccgtgcagcaaattgtggtgaatcaggcagggtactacggcgtggagcgcaaagaagcgtacatccgcagcgaaaagtatcttaaacaactcgatctatggggaaaacgcaacgaacgtgcgcgtatgttatctggcgggatgaagcgccgtttaatgattgcccgtgcgttaatgcatgaacctaaactactgattctcgacgaaccgaccgcaggcgtggatattgaacttcgccgcagtatgtggggctttttgaaggatttaaacgacaaaggcaccaccatcattctcaccacacactacctggaagaagcagaaatgctgtgccgcaatatcggcattattcaacacggtgagctggtggaaaataccagcatgaaggcgctgctggcgaagctgaaaagcgaaacctttattctcgatctcgcaccgaaaagcccgttaccgaagctcgatggctatcagtatcgactggtcgataccgcgacgctggaagttgaagtgctgcgtgagcaggggatcaacagcgtatttacgcagttaagtgagcagggcattcaggtattaagtatgcgtaacaaagctaaccgtctggaagagctgtttgttagtctggttaatgaaaaacaaggagatcgcgcatgatgcatctttactgggtggcgctaaaaagcatctgggcgaaagagatccatcgctttatgcgtatctgggtgcagacgctggtgccgccagtcatcaccatgaccctttactttattatcttcggtaacctgattggtagccgtattggcgatatgcatggcttcagctatatgcagttcatcgtaccggggctgatcatgatgagcgtgatcaccaatgcctacgccaacgttgcgagtagtttttttggtgccaagttccagcgtaatattgaagagctgctggtagcgccggttccgactcacgtcattattgccggatatgtcggcggtggcgtggcgcgtggtctgtttgttggcattctggtgacggcaattagtctgttttttgtgccatttcaggtgcatagctgggtattcgttgccttaacgctggtgctcacggcggtgttgttctcccttgcgggtttgctgaacggtgtgtttgccaaaacgttcgatgacatcagcctggtgccaacctttgtgttaacgccactcacgtatttgggcggggtcttttacagtctgactttgttgccgccgttctggcaagggctgagccacctgaacccaatcgtttatatgatcagtggtttccgctacggcttcctcggtatcaatgatgttccgctggtcactacctttggcgtactggtggtctttattgtggcgttttatttgatctgttggagcctgatccaacgtggacgtggtttgcgtagctaaggctatttcctctcctctggatttgggggagaggagttttgacggctatcaccctttatcaacaatggtcagggtagactgattttcggctaaggaggaaggcgatgttaggttgggtaattacctgtcacgatgaccgggcgcaagagatactggatgcgctggagaaaaaacatggggcacttcttcagtgccgggccgtgaatttctggcgcggattaagctctaatatgctcagccgcatgatgtgcgatgctctgcatgaagcggactctggtgagggtgtcatcttcttaaccgatatagccggagcgccaccgtatcgcgtggctagtttattaagccacaaacactcccgttgcgaagtgatttctggtgtcacgttaccgttaattgaacagatgatggcttgccgtgaaaccatgaccagtagtgagtttcgcgagcgtattgtcgaactgggtgcgccggaggtgagtagtctttggcaccaacaacaaaaaaatccgcctttcgtcctcaaacataatttgtatgagtattaacccgcgattctgatggcgcttttgctacaataaaagcgttgtttcaccctcggttattttttcatgtacaaacaagctgttattctcctgctgatgctgtttaccgcaagtgtcagtgccgcgttacctgcccgttatatgcaaaccatcgaaaatgctgcggtctgggcgcaaattggtgacaagatggtgaccgtggggaatattcgggccggacaaatcattgccgtggagcccactgccgcaagttattacgcatttaattttggctttggcaaaggttttatcgataaaggtcatctcgagccggttcaggggcgacaaaaagttgaagacggtttgggcgacctcaacaagccgctgagtaatcagaacttagttacctggaaagatacgccggtctataacgcgccgagtgcgggaagtgcgccatttggggtactggcggacaatttgcgctacccgattttgcataaactgaaagacaggttaaatcaaacctggtatcagatccgtattggcgatcgactggcctatatcagcgcactggatgcccaacccgataatggcctgagcgtgctaacctatcaccatattctgcgcgacgaagaaaacacccgttttcgccatactagcacgaccacaagcgtacgcgctttcaataaccagatggcctggctgcgtgacaggggatacgcgacactgagcatggtgcagctggaaggctacgtgaagaataagatcaatctccctgcgcgagcggtggtgattacctttgatgatggcctcaagagcgtgagccgctatgcgtatcctgtgttgaaacaatatggcatgaaggcgacggcgtttattgttaccagtcgcatcaaacgtcacccgcagaagtggaacccaaaaagcctgcaatttatgagcgtttctgagcttaacgaaattcgcgatgtatttgatttccagagtcatacccattttttgcatcgggtagatggttatcgccgacccatattactgagccgtagtgagcacaatattctgtttgattttgcacgtagtcgccgcgctctggcgcaatttaatccgcatgtctggtatcttagctatccgtttggcggatttaatgacaacgccgtgaaggcagcaaacgatgccggatttcacctggcggtgacaaccatgaaaggcaaagtaaaaccgggggataatccgttgttactaaaacgactttatatcttaagaacggatagcctggagacgatgagccggctggtgagtaaccagccgcagggataacaatcaagcaacctgtaccggaatcgctttcgcggtacgtttcatttcattgtcgccttcaaaataggcgacgttgggtcgccaggtgcgagcttcttcatctggcatggtaacgaagctggcgatgatgacaatatcgccgacactggcgcagtgggccgccgcaccgttaacagaaataattctgctaccgcgttctgccgcgatggcataagtggagaaacgcttgccgttggtgacattccagatatcaatggcttcgttttcgagaataccggctgcgtcaagaaaatcctggtcaatggcgcaagaaccttcatagtgcaggtccgcatgagtcactttcacgcggtggagtttgccctgcagcatcgtgcgaatcataacttctacctttctaccctgtcgttaacgaagcaggcgatgcctgctttgaggaaattctcacgcagtattgcccgatttttgtttagtgtctactcatctgacggcatttgcgtcagcagtttgcgtaccgcgccgaagcgtgccatgtatcgcctgtaacgaattgatatttctctgaacgctgctcggtaaacaataaagaggtggctgacgatagcgcgccttgactggatactgccttcacgcaaagccacacggaagacagggaagatggatgcaccgagtaccacaccgcatgacgcggtatttaaacaatttttaatgcatgcggagacggctcgcgactttctggagatacatttgccagtggaattacgcgaactttgtgacctcaacacgcttcatttagagagcgggagtttcattgaagagagcctgaaaggacacagcacggacgtgctctattccgtgcaaatgcagggcaatcccggttatctgcatgttgtgattgaacaccaaagcaagccggataagaaaatggcctttcgcatgatgcgttattctatagccgccatgcaccggcatctggaggctgaccacgataagctgccgctggtggtgccgatactgttttatcagggcgaggccacaccttatccgctaagtatgtgctggtttgatatgttttacagcccggagctggcgcgacgcgtctataacagtcctttcccgctggtggatatcaccatcacaccggatgacgaaatcatgcaacatcggcggattgcgattctcgaactactgcaaaaacatattcgccagcgcgacttaatgttattgcttgagcaactggtcacgctgatcgacgaagggtacactagcggaagtcagttagttgccatgcaaaactatatgctgcaacgcggtcatactgaacaagcggatttgttttacggtgtgttgagagacagggaaacgggaggggagtctatgatgacgctggcgcagtggtttgaagagaaagggattgagaaggggattcagcagggaagacaggaagtaagtcaggaattcgcccagcgtcttctgagtaaaggaatgtctcgggaagacgttgcagagatggcaaatttacctcttgctgagattgataaggtaattaaccttatttaagttacctgtgttatgacagatgacgtggggtaaattaataactggcgccatcagccgtagcgccagttaagtattacgccagctcgaccattttgttgtcgatcaggcgagcatcgccaagccaggcggctaccagaattactgcccgtttgctggtttcagaaacttccagcaatgtgtcggcatcgcgaatctgaatatcatcggcgcggaagcctttttcattcagttcttgccccgcaatggtaataatttcatcgagatcccgttccccagcctgcaatttgtcagcaatgctacttaaaactttgtacagaccaggcgcaattttgcgttgttccgccgtcagataaccgttacgggaacttagcgccagaccgtctttggcgcgcataattggcacaccgacaatctcaatatcgaagcccatatcggcaaccattttgcggatcagcgccagttgctgaaaatctttttcaccgaagcaggcgatgtccggctggaccaggttgaacagcttgctgacaatagtgctaacgccgcgaaaatgtcccggacggctggcaccttccagcatggtgctaaggccaggaacgtcaacgtaagtgtgggtttcagtaccgttcgggtagatctcttttacgctaggggcgaaaactaaatccactttacgtttgtttagcttctcgcagtcctcctgcaaggtccgtggataacgagccagatcttccgggcggtcgaactgcatcgggttaacgaaaatactgacgacgaccacatcggcgcgggctttggcttcgtcgaccagcttcatatggccatcgtgcaggttacccatggtaggcaccagcgccacgcgcttgccttccatacgcaggcggcgaatttgctgacgcagcagcggcagggtttcgataattaacacaacgtgactccttaatggaaactgtgttcttcgcccggataaacgccggactccacttcagccatatactgccgcacagccgcgcggatgtcgcccgtttcggcgaggaaatttttagcgaatttaggaatgtgaccgccggtaataccaaaggcgtcgtgcatcacgaggatctgcccgtcagtgacgttgcctgcgccaatgccaataaccgggatcgccagtgcttcggtaatacgttttgccagttcaaccggcacgcattccagcaccagcagctgtgccccagcagcttctaaggctaatgcatcgctgagcagttgatcgcccgcttcatcgccgcgcccctgaactttgtagccaccgaaaatattcacactctgtggtgttaaacctaagtgaccacatacaggaacggcacgttcggtcagcatttgtacggtttctaccagccactcaccgccttcaattttgaccatgttagcaccggcacgcataaccgttgcggcgttttcgaaggcttgttccggcgtggcatacgccataaacggcaggtcagccagcagcaggcagtttggtgcgccgcgacgtacggcggcagtgtggtaggcgatatcggcaacggtaactggcagggtggagtcgtgcccctgaaccgtcatgcccaggctatcgcccaccagcatgacgttaagcccttcatcagcaaagagtttggcgaagctatagtcataagcggtgatggtcgcgaaacgttttttttcctgtttgtacttctgcagtaaggagatggtggtcggtttcataacgtatcctgataaattgatgttgtgctgtctggcattttatcagtcacattggtgggggcaatgatttatccgtagcagcactgccagaaggtgacagtgctgctacgttatcagggataggttacctggaaagtactggtggctttaaattcgccgggttcgatagcaatattcccgtcttgctttaatgttgcctggaaatgaagaggctgacttgtgccgttaccttgattagggtaaaccccatcggaggtgtcatcttcggtttcataatctatataaacagaattcgtatcattaggttttaatgtcattagcggatttttactggttgctaaaccttcaatgagtacgccaacgcctttggcggcagtgcttccagtaagcgtattaccaagcagttgtgtgttttgagtacctacttttccagtgacgagttttgtttcaatattacgcacacgaatacaattctgaaggctgatatcaaagggaacaggactagcgccatttttaattgtcccagagctatattctcccattctaaccgtactaccattgacacttggcccggtaagtatggaggtaaaacatgttggtaaggttaatttgacattattcagtgtgaaattgacataaatgtggttgctgtgatctacaacttttgtaccaggactgtaggccttaaagctataaaggtaattactactactggataactggacttgctgattaagtgtaggatcgaaattagtatctgtataaaattcaacagttatgttgtgtactataccaccaatagcccaaaacttatcgtagtcgtctgctttgttgcaacccttagtttgtagatcgctgtctgtgacggaaaagaaaaattcttggttggaaggatctccgatatagattcctgggctttgaatgtcagttattgtatcgtatgcagaccagaccctacttattaacatggtgtaatacagaccaggaacagatgtattaaatagtttatgtccgccataatctttaccactatagaccatggcattttcaatagttattggaccaggattcgctctgccagatgtattgcagtaaagaataccaccaccggtacctgtatccaggtaactccagtacatttttaccccagtcgggccgagctgcgtgggtttataaaaaaccaagttgcttgctgtacttgtgtaattaaaggtcatctgtgcggcagtggaggggcctcgatagttatcaactcctgcattatttcccacaataaaacttgtatatgcactgactgtattacaacaagaatacagtgctaaaaaaagaatgtacctgaagatagtcttcatttttactccaatgtttctttattgttatggtttgcgctgtttttgtttgttattcgtagtaaatatccactaacacatggctcataagttgaccagatgtaacactcaatgcaggatcgattttttgcattcgggtgctaaatttccaggaactaccattcatgtcatcgctcattactggataaacggaacgagatccgccactagcattaagaacattgaatgtattcgcgctatcctgagtagaaaatataactactcctacattacttgctccactgctaatttcattagcaaatatttgcctagagccagcagccatgacaccgctaagggctctaaaatcaatatgtaactgatttagcacatcgccagttccctgtaatgcacagtcggatacagtgatagtgaactcttttccacctggttgataactttcaggagtaacattaccactaaaatatcccaccccaacgacgccaagatcaatattaccctggttactgattccgcttttgcaggtgctgttttttacattggcaacaaggtcaatatcctgtccagcaatggctggacaggcgatgcaaaacagtaaactcagaaacagaattattctcttcatcagcttacgttgagtgggatgcatatatagttcctgaatctgtaagtctgttagttataggttactgtaaatgtggctggtgcagaaaacttacccgcagtgacattgtttacggttttatttttttccacgaccaggcgtgcactcatcggataataaacgaccgcattggctgcagtggagattgttacctcttgacttgctggtgttacacagctaaattgtgttgcactccctgttgccggagttacagtgctccagacttcaacggcgacagcacttgctttatctgcggctgtggaaccatttgcaaaccccgcaccgtcattagcagttccctcgcatgtggctcgcttggttaattttatttgcgcttttttattggggatacccgcacagtctttgaatttgagtttgaatgtttttactttggtcttggcattgatttcagaaatatatacatcaccaaaatcaacaacagaaatgtcctgatcagagtcatttactaatgtagcggtacaagtacccatttctacagtagtaataacggtcagtccaatactgtctgttgccgcataagagagtacgctgaacaaactggcagccaaaacgacactgctggataatccataacgtaaatttttaaatgtcatcataattatccttcttattgatagatgaaattaaacgtcgccagtgcacgaaaattccccggtacgccttgccctgcatctgtttcacgtagcgcaacggtcatttcaagacccttatcgggctgcatctcgtctgtgctccagcgtatcttttccgcactgttaggtttaaggaaagtggcatcatcagtagtccgttttttgaaacccataccgatattacttgtcgtgctagaactatcaccagactgcggtataataagcttaggactgctactacttgcatttccggtcagagtggtatcaatccaactgatgccactgctgcacccactggcaaccagtttaaaatcagcctgagattctgtcgttttattcgcgatcttatccagacccatcttagggattctcaatgtgtagttattattgccatcattcgtgacgttattaccagtaagtgtgatgttacaggttgtcgctttgacagtggctgtaaactctacattaatatccgttgcaaatacactgggacttaataatattcccatcagtatcactattttatgtggcgttgtttttatcatttgacgtcccttgtagttactgaatctgacaccgaattccattcagaataatagattgtgctattttttctgcttctgggctttgttgataatgcgcaagacaacttacgggtttactttgttcgagccatttaatgctgatatttccctgctgctcaataccacgaacaaatgcttgtccaccctgtccaacattaccaatgacattgccttgctcatcataaatatctgcagcaaatggaatatttttaccatcacttcgtgtgatgttcataatggcactttgcccttgcacggtttcaaaatcagcaaagacgacactaccctgacgcggtacagctactgcactggtactttttaattcaacatcgttctcaagatcgttgatatccagcgcgatacggttttcatgataaggagaaagagcgctggtgacaccataaccccatcgatcgatagtactgttgccataatttattcgcgctccttgagcacctggagcctgaactaccgccagtgtatcggagtcgctaaaactatcattactgaaagtcagtccaccgctatgcaatacaaaaccaccgtcggtgctgagagaaacttgacggctgttatcgctatttgcagaaatactacctgccagcgttccccatggactctcatagctggcataacccccaacataactcaaatctttgctggctttattcatcgtatagccagtattcacgctataactgacgcgagcgttatcgctatagccactgctgctaacgttgagttggttattacccttaaagtcactgcttatttgagtatcaatactctggaaaccactagtacgttgttcagtgccaagtaatttttcaattggaatggtgaaactaagataaacgctatcgtcagtgtcgccgtcttcattccaactacgctgggcactgacactgtagctgccccaggatgtactgttactgtagccaatagagtaattgctacgattttgtccggaagcccagtaatcggaccaacttccggaaagataaaaactaccgtaatcttttttctcaaatttcaacggttggttaatactgaccgtaacctgatttttcatgcgactgtaattacgcatggatttcggttcaagatcttgttcgggatgtttcacttcatcaattagagttagtgcatcattaagaccaaggtaattctgtgtgctatagcgataggccgcgatattcagactagtacttgtttcttcgaataacttgttccaggaaacacgataactttgcccctggtatgttttatcatccgggatacgaacattggaatgagtcacatcgaaagaaaatgcaccaacactagtattcagaccaagacctaacaaaccagcggtatagttattatcggttatctgaataccggtataacccgtcagatagttattcaggccgtagtagtagcttgcttgaaataaattaggctcatcctgaatatcatcttttaagacctgaccgccgctaatatcccaacgtccaacgccagggcgtaacatttgaacaacggaactgaaaggttggctgaatgtccgcttactgccatcggattcttcgatggtaacaataagatcgctgccgtacccactcggactcagatcatcaatgacgaaagcgcctggcggcaccgtcgtttcataaatcttatagccaccttgcgtaatagtgactttggcgttggtattggcaacgccatgaatgataggcgcaaagctggctaaagtcggaggcaacatgcggctgtcactgtataaacgaatgcctcggatactgacggaatcaaaggtttcgcccgtcgtataagactcaccaagaatgagttgagaacgcaggctggcgatatcacgctgaacataccgattcttaaaatcataattactgccagaatcggtcatccagttgtagttgccgctggcacgcagtcgccatgcacctaaattcatcccaccgttaaatgcagcataaatgctttcattttttcgaccaggggtttcactatgatatccgttgaggttgtaactcaacatggccgcattaatgccgttttcccataagcttggatcaacatagttttggtaatttttcattacccaggcttgaggaacgtctatatccagacgttgatcgttaacgtcataacgaacagaagcctgagggataatttccgtcaaattgaggcaattgccgagcgtttcatccctggcaagcagaacggctttttcgttatttatatcgggagaattaatatgaaactgcaataaattctttaatgtgatacaagcctgggcgttcttttttccttcaattgcgacaaatgtaatactttggttaatgattggttggtcgtttacataaacactgacgtcgtaaacacccggtatagcggggttaccttcactgtaccggctgagatcaatattagatgcattctgccccatcaggaaggtatggtcatattcaacgagttcagcactgaaagcagtattgcaatacagcagcgcgcaaaacgtggcgatacgggtcagatgatgataatttttagtatattctatagtcacgctatgcttcctgcggaattatatccttgcctgattacagcctggcattaccttcaattgcgccaccaaagtcattaatggcgtaaaaatgcacttttgcagaattcgctttgccattaaggccattgactttcatgacctcatcactaaatggtgcaatcattttcacatcaatcggatagcgtttaccgctagcttctaaatcaccactgctaaaagagacgtagtaaggggttggattggtcactcgtaaactcgccttaccttcactaccactccagaaccacttcagggctaacggggcttcagagggatttcccttcaatccatccgggcgatagaaaagttttatacgtgtgcgaaatgccagttgcagcaggctttgattcgcgaccttttctgcatctggttttggtggaacttccagtacgttaaaccagaacacgctctctctgtctttaggcagactggtgctggctgtgtacattaatttgattgtttgcccacgtttggcatcaatacggcttactggcggcgtagcagtaaaagggactgtaatactgccaggctcagcgttgtcatcgccagtatctaaccaactctggacaagcaacgggttattccctttattttccagacgtacgttgacacttttttgatcgcttttatatattacgcgagtaccgctaatgacaatgtccgcaatagagctactactaaaagccatacaggttacgaagcataaagctgttgtatgtttggtgttaaaaaacataaaccatccctgatagagttaattaaaacagggaataatataaaatagaaattattattccctgtatattcattcaatcaatttaactggtgaatacttactgataagtaatggtgtatgcagtgttagtttttacataaccagcagttgctgtttggtctgcgacggcacgaacgtaagacgctttaaaatcataaacagcagattttgtcgttgcatccagggctttagtatacacatcgccagggttgttaatttgaacctgtttgatagtggaaccatcaatattgtgtagagcgatattaacgccgtcagatgggttgttaatagacatgtcgttgttcaaagtccctttgctgttaccaaagaaaacagaaccgaaggtcattttagccgtgctacctggattcggatttgctttgctgcagtcaacggtgatgctgaaaggtttagctttagcgccaacggtgtcattcagtacgccagcatcgatttcaccaacggttgcggtttgcagcaggatcagaccatccttgttaccgccgtcaacgcgggtttcacaggtgttatcaacaaccagaccactgatatttaactgaccgccgtccatatcagcagaagcagtacctgcaaccatcgccagcataagaccagacagggcaaaacctaattttttagacataaaaatcctttaataaaattccattagtcagactacatgtttgaagaatgactattcatgacacaaataggagaaacaaatgttagatattaatgagcaatgatatttgttacccaaatttacaaccattgttcattaggtcgcctattgtgcactttagaagcttttgaacaaattaaatttacttaattcaaaattaagtaaaaataagttcacaagtgcaattggttagggtatggagatgggattgatatttatttataggaagttatattatttccgcaaagagatgtttaaactaaaatcgtaattaaggaaagagatgagatatgattttcagaaaatatttatattcgcaatataaataaattaccatttgtttaatttgtcaaatgctcttgtatgtaagatttgacgcaacatctccccatcaggaaacaccaactccggcgcgatttcaaacagcggccacagcataaatccacgattcttcatatcgtagtgcggaacggtcaggcgttcagtatttatcacttcattaccaaacagcatgatgtcgagatccagcgtgcgtggtccccagcgttcagctttgcggacgcgaccttgctgcaattcaatacgctgtgtgtgattgagtagctcttcaggtgcaagagaggtttccagcgccacggctgcgtttaagtaatcgggttgatcttgcggccccagcggtggggtgcggtaaaagctagaaacggtaagaatgtggctttcagggatatcgcctaatgctttcagggcagcattgacctgctccagcggagaggccagattgctgcctatggcaatatacgccactgtcatgcggtaccctcacgacgtggtgcgcgtttgcgtggacgacgagtacgacgacgcggactcggttcttcatccagctcgttgagcatccctttttggtctggtggcgcggaaacctggaactcaccccaccatttcaccagacgctgcagttcagcgttacgctcaacttcagctcgcaaggccaacaggtcataagccgcacggaacttaggatgctccagcagtttccatgcgcgtttaccctgacgacgggacatacgcaactgcaactgccagatatcgcgggttaatgtcgtcagacgtttcgggattgccagactacggcaggcttcgtccagcacgtcgttcatcgccagcgcgaaagcgtcgtgataggtcaggccgctttcctgggcgatcttctgtgccgtctccagcagtgggtaccagaacatggcggcaaacaggaacgccgggttcacgcgcatatcgttatggatacgcgtatcggtattcttcagcacctgttcaatgatccgctccatcgggctgtcgccattttccgtgaagtagcgggtaatggtcgggaacagcggctggaacagatgatattcacacaacagcttataggtttcgtaaccgtagcccgcttgtagcagtttaaggctttcttcaaacaggcgtgccggtgggatatcgttcagcagggtagcgaggcgagggatcggttctgcggtttccgggctgatgcgcatacccaatttggcggcaaaacgtaccgcgcgcagcatacgtaccggatcttcacggtagcgcgtttccgggttaccaatcagacggataacgccgtccttcagatccttcatgccgccaacgtaatcacggacggtaaaatccgctacgctgtaatacaggctgttgatagtgaaatcgcggcgctgggcgtcttcttcgatggagccgaaaatgttgtcgcgcagcaacatgccgttttgcccgcgttgggaggtcgtgcggtcgctgacgttaccttcgtggtgtccacggaaggtcgcaacttcgataatctccgggccaaacattacatgagccagacggaaacggcgacccaccaggcggcagttacggaacagtttgcgcacctgctcaggcgtggcgttagtggttacgtcaaaatctttcggctttttgccaagtaacaggtcgcgcacgccgccgccaaccagccaggcttcgtatcccgctttattgagcctgtacattaccttcagggcattttcactgatatctttgcgggaaatagcatactgctcacgcgggatcaccgtcacctgtggacgggcgactgcctgttcagcctcgctttcctcgcggcttagcaccttgcggcaaaaattagcgactcgggtaaaaatagtacacctcggtagtgtcaaacatcattcaggacaaaaaaatagcggctaatcatagctcagcaactcgcattactgaatgtactatttacaattgcgctctcgggcacggcggtaagccgccagtttttgacggcactctgaaggatttgctcgacgctgaaatcctgccagtgtgcttctgcctgctgccccagaaattgaagtgccgcgattagtaccgggcgtggatcgcctttcggcaacgcaggcgcatgattctgcttggaaagtttagcgccttgtggattaagcgccagcggcagatgaatgtaatctggcactttccagccaaaaagctggtacaggctgatttgccttactgttggttcaatcagatcagccccacgcactatttctgtaacgccctggaaatgatcatcaaccacaacagccaggttgtaggcgaacaacccatcacggcgatgaatgataaaatcttcccgtgccagtttttcgtcggcgtgaataatgccgcgcagctggtcagtaaattgcgtgaccggatgctgctggcggatacgcactgcggcgttgtctggtccatgatgcaacacccggcaatgaccgtcgtaaataccgccaatgctttgaatacgcgcacgcgtacaggtgcagtaataacttagtccttgttcatgtaaccaggcgagtgcttcacgataggcgtcgtgacgttggctttgccagagaacatcgccgtcccagtgcagaccgtaatgttccagctggcgcaggatagtttctgcggcaccgggaacttcacgaggcgggtcgatatcttctatgcgtaccagccagcgaccttgccgggcgcgagcctgcaaatagctgccgagcgcggcgatcagagagccaaaatgaagctcgccggaaggagagggggcgaagcggccaatatactgtgtgtctgtcatctctttgaacaaaaaataaggcgggagcatttcccgcctgtggtaaacgtgatggaacggctgtaattagccagccatctgtttttcgcgaatttcagccagcgttttgcagtcgatgcacagatcggctgtcgggcgcgcttccagacggcgaataccaatttcaacaccgcaggattcgcagtagccgaaatcttcgtcttccacttttttcagcgtcttctcgatctttttgatcagcttacgctcgcgatcgcggttacgcagttcgaggctgaactcttcttcctgggctgcacggtctaccgggtccgggaagttggctgcttcatcctgcatatgtgtaacggtgcgatcgacttcatccctgagttgattacgccatgcttccagaatacgacggaagtgcgccagctgggcttcattcatatactcttcgcccggcttctcctgatatggttccaccccagcgatggcgagaatactcagggagcttgttttacggttttgcccttcttgcatgttgcttctccttaacacgcactatcgatccccatgttcgggggaaaaatgaggccgctataaatagcagatgcttttccggatagcaattatctaaacgtaacacttgacaactgtgtgaggaaaagcgtatttgcgcacgcgaccagaatgtaaattaaccagttacttactttattacaatgtaaccggcagactttttttaagagccatgccttcagcagaaatttccgctttgtaagccagaatttctacccccctctgttgagcttcactcaatagttgcgcgtatttctcatcgatgtggcgcgcgggactaaaccgtgtaatggcactatgcagcacggcgaaaaagataaccgcacgctggccttcagccgctacgctcatcaactcccgaaggtgtttctgacctcgttcagtgaccgcatcgggaaaatatccctgttcgttctccgctaacgtaacgcttttcacttcaatatagcagtctggacggctatccgcctgcaacataaagtcaatacggctgcgttctgcgccgtattttacttcgcttttcaggctgctatagccactcagttcactaatactttcattaaggatagcctctttcgtcaacctgttagcccaaagcgtgttgacgcaaataaatgcgccgctctggctttgagttaattcccaggtgtgtgggtatttccgtttggtgttgtcactagtgctataccagacggtatcgccaggcgttgcacaaccggtcatcgcacccgtattcgggcagtgtagcgttaattcgcgaccatcgggtgtgatcacatcggctaaaaaacgtttgtaacgctgaattagcgtcgcgcgctgtagagggggagaaaattccattgcgacaatccttgttattgcgttagcgcccagcgttttagcggcgtgtagcgtgtgcgtccacgggcaaagctggaggcgtaaagggtgaactccgtcaccgcatagctccagttaaaacctggcggcgggattgtcaccgcctcgctggcgtcgcgcaataaggtaatatgtggatgaaacggacgattgctttgaaaacaaccgctgcgggcagcctgactacggagcatattcgccagctggattaagccgcgtggcggctgacgcatccctaaccacaccacacggctacgcagccattgtccggcgtcatcaagcgtgagtgtgaaaccaggttgacgaatccgtccggctaaaagagaaagcgccttctctttctcggcgctcacttcgcctaaaaatgccagagtcagatgcaaattatcggcggcgaccggacgtcccgcctcaggtgggaagtgtgtggcgcgccaatggataatctgttcgcggatttctgcaggtaagtcgatagcaaagaacagacgttgcggttcagacatgtgaggcactcggttatgaattaccgcgatgctacaatgtggcgcgaagaatgttaaccctctggagcgttttgtgagcagcttgcccgttgctgccgtcttacctgaattacttaccgctctcgattgtgcgccgcaggtattattaagtgcgccgaccggggccgggaaaagtacctggctgccgctgcaactgctggcgcatcccggcattaacgggaaaattatcctgctggagccgcgtcgtctggcggcgcgtaacgtcgcgcaacggctggcggagctgcttaacgaaaagccaggcgataccgttggctaccggatgcgtgcgcaaaactgcgtcgggccgaatacccgcctggaagtggttaccgaaggcgtgctgacgcgcatgatccagcgtgacccggaactgagcggtgttggactggtgatccttgatgaatttcatgagcgcagcttgcaggcggatttggcgttggcgctgttactcgatgtgcaacaaggtctgcgtgatgaccttaaactgctgattatgagcgctaccctggacaacgaccgcttgcagcaaatgctgccagaagcgcctgtcgtcatcagtgaagggcgcagctttccggttgaacgccgttatttaccgctgcccgcgcatcagcgttttgacgatgccgttgcggtagccaccgctgaaatgctgcgtcaggaaagcggaagtttactgttatttttacctggcgtcggagaaattcagcgtgtgcaggaacaactggctagccgcatcggcagtgatgtattgctctgcccgctgtatggcgcgttgagcctgaacgatcagcgaaaagcgatcctcccggcaccgcaagggatgcgcaaagtggtgctggcgaccaatattgctgaaaccagtttaaccattgaaggtattcgtctggtggtggattgtgcccaggagcgtgtggcgcgttttgatccgcgcacggggcttacgcgactgattactcaacgcgttagccaggcatccatgacgcagcgtgccgggcgcgccgggcgtctggagccgggtatcagcctgcatttaatcgccaaagaacaagcagaacgcgccgcggcgcaaagtgaaccggagatcttacaaagcgatctttccggtttgctgatggaattactgcaatggggatgcagcgatccggcgcagatgagctggctggatcaaccgccagtagtgaatctactggccgcgaaacgtctgttacaaatgctgggggcactggagggtgaacggcttagtgcgcaagggcaaaaaatggcagcgctgggtaacgatccgcgtttagcggcaatgctggttagcgcgaagaacgacgacgaagctgctaccgcggcaaaaattgccgccattctcgaagagccgccacggatgggcaatagtgacctgggcgtggcgtttagccgcaatcaaccagcctggcagcaacgtagtcagcaactgttaaaacgcttaaacgtacgtggcggtgaggcagacagtagccttatcgcgccgctacttgccggggcgtttgccgatcgcattgctcgtcgccgtgggcaagatggacgctatcaactggcaaacggcatgggagcgatgctcgatgccaacgacgcgctaagccgccacgaatggttgatcgcaccgttattattgcagggcagcgccagcccggatgcgcggattttactggcgctgctggtcgatattgatgagttagtacaacgctgcccgcagctggtacagcagtctgacactgtggagtgggatgacgcgcaaggtacgctgaaagcctggcgtcggctacaaatcggtcagttgacggtgaaagtgcagccgctggcgaaaccgagtgaagacgagttgcatcaggcgatgcttaatggcatccgtgataaaggtttaagcgtgctcaactggacggcggaagcggaacagctacgcttgcgtttgttatgcgccgcaaagtggttgccggaatatgactggccagcggttgatgatgaaagtttattggcagcgctggaaacgtggctgctgccacatatgactggcgtacatagtctacgcggcctgaaaagtctcgacatttatcaggcactacgcggattacttgattggggaatgcagcaacgtctggatagtgaattgcctgcgcattacactgtgccgacgggaagccggatcgccattcgttatcatgaagataacccgcccgcgctggcggtgagaatgcaagagatgtttggcgaggccaccaatccgacgatcgcccaggggcgcgtgccgctggtgctggagttgcttagtcctgcccaaaggccattacaaatcacacgagatttgagcgacttctggaaaggagcgtaccgtgaggtgcaaaaagagatgaaagggcgttatcccaaacatgtctggccggacgacccggcaaatactgcaccgacgcgacggacgaaaaagtatagctaaggttggttttctccctctccctgtgggagagggccggggtgagggcatcagcgcgcacgttcaccctcaccctaaccctctccctcaagggagaggggaccgatcgagcacaaattttgagagatatcttcttctgtcttgtaacagaagaacagaaaatcgggcttttgcgcctgaatattgcggagaaaaagcatggccgggaatgaccgcgagccaattggacgcaaagggaaaccgacgcgtccggtcaaacaaaaggtaagccgtcgtcgttacgaagatgacgatgattacgacgattatgatgactatgaggatgaagaaccgatgccgcgcaaaggtaagggcaaaggcaaagggcgtaagcctcgtggcaaacgcggctggctatggctactgctaaaactggctatcgtttttgccgtgctgatcgccatttacggcgtttatctcgatcaaaaaattcgtagccgtattgatggcaaggtctggcaactgcctgcggcagtttatggccgaatggtcaatcttgagccagacatgaccatcagcaagaacgagatggtgaagctgctggaggcgacccagtatcgtcaggtgagcaaaatgacccgtcctggcgaatttaccgtgcaggccaacagcattgagatgattcgccgtccgtttgatttcccggacagtaaagaaggacaggtgcgcgcgcgtctgacctttgatggcgatcatctggcgacgatcgtcaatatggagaacaaccgtcagttcggtttcttccgtcttgatccgcgtctgatcaccatgatctctagcccaaacggtgagcagcgtctgtttgtgccgcgcagtggtttcccggatttgctggtggatactttgctggcgacagaagaccgtcatttttacgagcatgatggaatcagtctctacagtatcggacgtgcggtgctggcaaacctgaccgccggacgcacggtacagggtgcgagtacgctgacgcaacagctggtgaaaaacctgttcctctccagcgagcgttcttactggcgtaaagcgaacgaagcttacatggcgctgatcatggacgcgcgttacagcaaagaccgtattcttgagctgtatatgaacgaggtgtatctcggtcagagcggcgacaacgaaatccgcggcttcccgctggcaagcttgtattactttggtcgcccggtagaagagctaagcctcgaccagcaggcgctgttagtcggtatggtgaaaggggcgtccatctacaacccgtggcgtaacccaaaactggcgctggagcgacgtaatctggtgctgcgtctgctgcaacagcaacagattattgatcaagaactctatgacatgttgagtgcccgtccgctgggggttcagccgcgcggtggggtgatctctcctcagccagcctttatgcaactggtgcgtcaggagctgcaggcaaaactgggcgataaggtaaaagatctctccggcgtgaagatcttcactacctttgacagcgtggcccaggacgcggcagaaaaagccgccgtggaaggcattccggcactgaagaaacagcgtaagttgagcgatcttgaaactgcgattgtggtcgtcgaccgctttagtggtgaagttcgtgcgatggtcggaggttctgagccgcagtttgcgggctacaaccgtgcgatgcaggcgcgtcgtagcattggttcccttgcaaaaccagcgacttatctgacggccttaagccagccgaaaatctatcgtctgaatacgtggattgcggatgcgccaattgcgctgcgtcagccgaatggccaggtctggagtccgcagaatgatgaccgtcgttatagcgaaagcggcagagtgatgctggtggatgcgttgacccgtagcatgaacgtgccgacggtaaatctggggatggcgctggggctgcctgcggttacggagacctggattaaactgggcgtaccgaaagatcagttgcatccggttccggcaatgctgctgggggcgttgaacttaacgccaatcgaagtggcgcaggcattccagaccatcgccagcggtggtaaccgtgcaccgctttctgcgctgcgtagcgtaatcgcggaagatggcaaagtgctgtatcagagcttcccgcaggcggaacgcgctgttccggcgcaggcggcgtatctgacactatggaccatgcagcaggtggtacaacgcggtacgggtcgtcagcttggggcgaaatacccgaacctgcatctggcagggaaaacagggactaccaacaataacgtagatacctggtttgcgggcattgacggcagcacggtgaccatcacctgggtcggccgtgataacaaccagccgaccaaactgtatggtgccagcggggcaatgagcatttatcagcgttatctggctaaccagacgccaacgccgctgaatcttgttccgccagaagatattgcagatatgggcgtggactacgacggcaactttgtttgcagcggtggcatgcgtatcttgccggtctggaccagcgatccgcaaagcctgtgccagcagagcgagatgcagcagcagccgagtggcaatccgtttgatcagtcttctcagccgcagcaacagccgcaacagcaacctgctcagcaagagcagaaagacagcgacggtgtagccggttggatcaaggatatgtttggtagtaattaacatctaagcgtgaaataccggatggcgagttgccatccggtaaaataacatcccatctaagatattaaccctttcttttcatctggttgtttattaacccttcaggaacgctcagattgcgtaccgcttgcctgtaagactcaatgtaagccgtgccaaaatatgatggctaggacgagctagaacccgccagcgtttcgaatattatcttatctttataataatcattctcgtttacgttatcattcactttacatcagagatataccattccatataacggccctgtacgcctggacggataaagcgtttacgcgacaacggatgcccgatgcgacgctggcgcgtcttatcgggcctacaaacggccccgaatcgtaggtcggataaggcgttcacgccgcatccgacaaaccatgctggatcacaacttcgcaaacacccgacgtgcagcatcgatggtgttattgatatcttccatgctgtgcgccacggacataaagcccgcttcaaacgcactcggtgccaggtaaacaccttcgtccagcatcatatggaagaaacgcttaaagcgttccacgtcacaggccatcacatcctgatagcacgtcacggactcggcgtcggtaaagaaaataccgaacatgccgccaacgtggttaacgaccagcggaattccggcttcttctgccgcttccagcagaccttctgccagacgtgttgtcagctcatccagcgtttcgtgaacgcccggctgcgcgacttcattcagacaggcgaaacccgctgccatcgcaatcgggttaccggaaagcgtacccgcctgatagaccggacccgtcggggccagcgcatccattacatcacgacgaccaccgaatgcgcctaccggcattccaccgccgatgattttgccgaggcaggttaaatctggcactacgccgtaataatcctgtgcgccagctagcgctacgcggaaaccggtcatcacttcatcgatgatcagcaacgcgccaaattcgtcgcacagcgcgcgcagacctggcaggaactctggcagcggcggaacacagttcatattgcctgccaccggctcgacgataatacaggcaatctcttgcgggtattgctcaaatgcggcgcgtacagaagccagatcattataagtacaggttaaggtatatttggcgaaatctgccggaacgcccgggctgtttggctggcctaacgtgagtgcgccagaaccggctttcaccagcaggcagtcagcgtgaccatggtaacacccttcaaatttaataattttgtcgcgaccggtaaaaccacgggccaggcggatggcgctcatggtcgcttcagtgccggagttcaccatgcgcaccatatccatggtcgggaccagttcggtcaccagttgcgccattttcacttccatttcggttggtgcaccaaagcttaaaccacgctcggcggcttcaatcacggcattgcggattgccggatggttatggcccagcaccatcggcccccaggaaccgacataatcgatataggctttgccatcaacatcgtacagataagcgccgtccgctttttcgataaacagtggagtgccgcccacgccagtaaaggcgcgaacaggggagttcacaccgccagggatcagctcgcgcgctgcgctgtaaagattttcagacttactcatggagggttcctgattcgtagaaaaagtgaatggctgctattctatgttattcataacaagttaaatactcgtcaaacatcaggctgcttgtactggtgcaatcctgatttcttagagtataaaagttttgtgcatttgaaacattacgctttgcaaaggattttcatggaacgtgcgagtaaaatgccgtcatcttatttgtatgaccaataagtgatcattggatgaaaactgatactccctctttagaaacaccgcaggccgcgcgcctgcgacgcagacaactgattcgccaacttcttgagcgcgataaaaccccgttagccattttgtttatggcggcagtcgtcggcacgcttgttgggctggcagcggttgcttttgacaaaggtgtcgcctggttgcagaaccaacgtatgggggcgctggtacatactgctgataattatccgcttctgttaaccgtcgcttttctctgtagcgcggtgctggcgatgtttggctactttttggtgcgcaaatacgcgccggaagcaggtggtagcgggatcccggaaattgaaggggcgctggaagatcaacgtcccgttcgctggtggcgtgtattgccggtgaagttctttggcgggctggggacactcggcggaggcatggtgttggggcgcgaagggccaaccgtgcagatcggcggtaacattggccgtatggtgcttgatattttccgcctgaaaggtgacgaagctcgccatacgctgctggcaaccggtgctgctgcggggctggctgcggcctttaacgcgccgctggcgggtattttgtttattatcgaagagatgcgtccgcagtttcgctatacgttaattagcattaaagcggtatttattggtgtcattatgagcaccattatgtaccggatttttaatcatgaagttgcgttgattgacgtcggtaaactttctgatgcgccgcttaatacgctgtggctttatctgatcctcggtattatttttggcattttcggccctatttttaataaatgggtgctggggatgcaggatttgctgcaccgtgtgcacggcggcaatattaccaaatgggtgctaatgggcggtgcgattggcggtctgtgtggattgctggggtttgtggcaccagcaacgagcggcggcggttttaacctgattcctatcgctaccgcggggaatttcagcatgggaatgctggtgtttatcttcgtcgcgcgggtcattaccaccttactctgcttctcttccggcgcgccgggcggtatttttgccccgatgctggcgctgggtactgtgctgggaaccgctttcggaatggttgccgttgagctgtttccgcaatatcaccttgaggcggggacgtttgctattgccggaatgggggcattactggcggcatctattcgcgcgccgttaacggggatcattctggttctggagatgaccgataactaccagctcattttgccaatgattattaccggtcttggcgcaacactattagcgcaatttaccggcgggaaaccgctatacagcgcgattcttgcgcgcacgctggcaaaacaggaagctgagcaactggcgcgaagcaaggccgcaagtgccagcgagaatacttgaacgaaataccagggtattagataatggcgattattattgggttagaatttgcccaattgccgatgtcgtttggagcaaaatatgagtgatgacgtagcactgccgctggagtttaccgacgcagcagccaacaaagttaaaagcctgatcgctgacgaagataacccgaatctgaaattacgcgtgtatatcaccggtggcggttgcagcggcttccagtatggtttcacctttgatgatcaggtgaacgaaggcgatatgaccatcgaaaaacagggcgttggcctggtggttgatccgatgagcctgcaatatctggtcggcggttccgttgattataccgaaggtctggaaggttctcgtttcatcgtgaccaacccgaacgcgaaaagcacctgcggttgcggttcttcctttagtatctaatctgttgttcatgtgccggataaactatccggcacatcttctctcttcaacgcccattctcatccagcgcaaacgtcggtagcttaagatgccaacgaatagccgccagccgaatcaatagcgtcacgaccatgcccatcatactggctgtttccagtggtacggaaaatgtgtaataagccgtagcgtggacaataccgccgataatacaggcagttgcgtagatttctgtacgtaaaatcatggggatttcgcgggccagaacatcacgaatgatcccgccgccaacgccagtaatgacgcccatacaaaccgcgattaacggaccggcttccgcattaaaggctttattcacgccaatgccgacaaacaccgccagaccaacggcgtccagcaccggcaacatccattttggtaagcgtcttggctggcgcaccagcacgatggtcagcatgctggtgaccattgcaacgaccagatcggtgggatctttcacccaaaataccgggccgtgatccagcgccatgtcgcgaattgtcccgccgcctactgcggttaccacgcccagtaccagaacaccaaaagggtccatacgcaattttccggctaacaaaacgccggagatggcaaataccgctgtgccgactatattcagccaatagacgagcattgttcaatccccactgagcacctgaaaaggtcaggcgttaatctacctgactaagcgcattacagagctgttgtgcagcgaggataatacgtgggcttgcacgttcaaaccagtcactcgtgagaggaataacgggaattttgagctgttcaccccagtattgtttgattttaggaatttggtccggtccgcctgtaatgacaatcgcctgtgggctgcgtgctaacacctgttcgcggctaacttgcggccagggaacccggctgtctttaaagatgttttctccgccacaaacttcgagtacctggttctgaatgctctcttttccactggtaaatggcggattaatgccgaattgcagaaaaacacgttttttaggtttatcagcatattgcgctttcaattgcgcgtactgatccagcagggattgcgcggcttgttcggccttgtctggttgcggactccagggggccagttgacgtaacgcattggcaatttgttcaatgcttgtcgcatcgacccacatcacttttattcccaggctagccagctggtcaacctgccgctcggcattacctccacgccaggcaatcaccagatcgggtttcagcgcgacaatgcgttccagattcatcccctgccaggtggaaacctgctcaatcttttgcgcttgtggaggatagtcggaatagctgctgaccccaaccggcgtgatcccggcggcaaaggcaagttcagtgttggcgggagaaagcgtgatgacgcgcggcgcggcgttgagccacagtggcgcaagaaaagacagggcgaccagcgccctgaacagactcttagccatgtgcaagtttctgcaccagactctcaaccatcaggctggactgtttagcggcaacagccaggaactcatcgaagctaagatgagactgttgatcggccacgtcggagatggcgcgtacgacaacaaacgggacgttgaaattgtggcagacatgggcgattgccgtcgcttccatctctacagcaatggcctgtgggaagttgtggcggattttcgccagaccaacagaaccgttgatgaaagcgtcgccgctaacaatcaggccacgtacagcgttaagattcagttcggcaatgcaggcctcagcggcagcgatcagtttatcgtcagctttaaagcctgccggacagcctggtaactgaccgtattcataaccaaatgccgtgacatccgcgtcgtgataacgtgcttcgtcgctgacaacgatatcgcccactttcaacgttggtgccaggccaccggcagaaccggtgttaataatcacatctggcttgcagtgttccaacagcaaagtggcacccagcgccgcagcgactttaccgatgccgcttttcagaagcgcaacctcggttccattcagttggccggtatagatttcgcaaccgccgagactgatagtttgacggttttcgattttgtcacgcagcagcgtaacttcttcttccattgcaccaatgatgccgattttcatagatttactcgcgataagcccgatttgaaggcatagtttaccatgcgcttacggggaagcgtatttctcacgcgggagaggacatggcacagattgatttccgaaaaaaaataaactggcatcgtcgttaccgtagtccgcagggcgttaaaaccgaacatgagatcctgcggatcttcgagagcgatcgcgggcgtatcatcaactctccggcaattcgtcgtctgcaacaaaagacccaggtttttccactggagcgcaatgccgccgtgcgcacgcgtcttacccacagcatggaagtccagcaggtggggcgctacatcgccaaagaaattttaagccgtctgaaagagcttaaattactggaagcatacggcctggatgaactgaccggtccctttgaaagcattgttgagatgagttgcctgatgcacgatatcggcaatccgccgtttggtcattttggcgaagcggcgataaatgactggtttcgccaacgtttgcacccggaagatgccgaaagccagcctctgactgacgatcgctgcagcgtggcggcactacgtttacgggacggggaagaaccgcttaacgagctgcggcgcaagattcgtcaggacttatgtcattttgaggggaatgcacaaggcattcgcctggtgcatacattgatgcggatgaatctcacctgggcacaggttggcggtattttaaaatatacccgtccggcgtggtggcgtggcgaaacgcctgagacacatcactatttaatgaaaaagccgggttattatctttctgaagaagcctatattgcccggttgcgtaaagaacttaatttggcgctttacagtcgttttccattaacgtggattatggaagctgccgacgacatctcctattgtgtggcagaccttgaagatgcggtagagaaaagaatatttaccgttgagcagctttatcatcatttgcacgaagcgtggggccagcatgagaaaggtagcctctttagcctggtggttgaaaatgcctgggaaaaaagtcgcagtaatagtttaagccgcagtacggaagatcagttttttatgtatttacgggtaaacaccctaaataaactggtaccctacgcggcacaacgatttattgataatctgcctgcgattttcgccggaacgtttaatcatgcattattggaagatgccagcgaatgcagcgatcttcttaagctatataaaaatgtcgctgtaaaacatgtgtttagccatccagatgtcgagcggcttgaattgcagggctatcgggtcattagcggattattagagatttatcgtcctttattaagcctgagcttaagtgactttactgaactggtagaaaaagaacgggtgaaacgtttccctattgaaagccgcttattccacaaactcagcacgcgccatcggctggcctatgtcgaggctgtcagtaaattaccgagtgattctcctgagtttccgctatgggaatattattaccgttgccgcctgctgcaggattatatcagcggtatgaccgacctctatgcgtgggatgaataccgacgtctgatggccgtagaacaataaccaggcttttgtaaagacgaacaataaatttttaccttttgcagaaactttagttcggaacttcaggctataaaacgaatctgaagaacacagcaattttgcgttatctgttaatcgagactgaaatacatgaaaaaaaccacattagcactgagtgcactggctctgagtttaggtttggcgttatctccgctctctgcaacggcggctgagacttctagtgcaacgacagcccagcagatgccaagccttgcaccgatgctcgaaaaggtgatgcctagtgtggtcagcattaacgtagaaggtagcacaaccgttaatacgccgcgtatgccgcgtaatttccagcagttcttcggtgatgattctccgttctgccaggaaggttctccgttccagagctctccgttctgccagggtggccagggcggtaatggtggcggccagcaacagaaattcatggcgctgggttccggcgtcatcattgatgccgataaaggctatgtcgtcaccaacaaccacgttgttgataacgcgacggtcattaaagttcaactgagcgatggccgtaagttcgacgcgaagatggttggcaaagatccgcgctctgatatcgcgctgatccaaatccagaacccgaaaaacctgaccgcaattaagatggcggattctgatgcactgcgcgtgggtgattacaccgtagcgattggtaacccgtttggtctgggcgagacggtaacttccgggattgtctctgcgctggggcgtagcggcctgaatgccgaaaactacgaaaacttcatccagaccgatgcagcgatcaaccgtggtaactccggtggtgcgctggttaacctgaacggcgaactgatcggtatcaacaccgcgatcctcgcaccggacggcggcaacatcggtatcggttttgctatcccgagtaacatggtgaaaaacctgaccagccagatggtggaatacggccaggtgaaacgcggtgagctgggtattatggggactgagctgaactccgaactggcgaaagcgatgaaagttgacgcccagcgcggtgctttcgtaagccaggttctgcctaattcctccgctgcaaaagcgggcattaaagcgggtgatgtgatcaccagtctgaacggtaagccgatcagcagctttgccgcactgcgtgctcaggtgggtactatgccggtaggcagcaaactgaccctgggcttactgcgcgacggtaagcaggttaacgtgaacctggaactgcagcagagcagccagaatcaggttgattccagctccatcttcaacggcattgaaggcgctgagatgagcaacaaaggcaaagatcagggcgtggtagtgaacaacgtgaaaacgggcactccggctgcgcagatcggcctgaagaaaggtgatgtgattattggcgcgaaccagcaggcagtgaaaaacatcgctgaactgcgtaaagttctcgacagcaaaccgtctgtgctggcactcaacattcagcgcggcgacagcaccatctacctgttaatgcagtaatctccctcaaccccttcctgaaaacgggaaggggttctccttacaatctgtgaacttcaccacaactccatacatcttcatcatcctttaggcatttgcacaatgccgtacgttacgtacttccttatgctaagccgtgcataacggaggacttatggctggctggcatcttgataccaaaatggcgcaggatatcgtggcacgtaccatgcgcatcatcgataccaatatcaacgtaatggatgcccgtgggcgaattatcggcagcggcgatcgtgagcgtattggtgaattgcacgaaggtgcattgctggtacttagtcagggacgagtcgtcgatatcgatgacgcggtagcacgtcatctgcacggtgtgcggcaggggattaatctaccgttacggctggaaggtgaaattgtcggcgtaattggcctgacaggtgaaccagagaatctgcgtaaatatggcgaactggtctgcatgacggctgaaatgatgctggaacagagccggttgatgcacttgttggcgcaggatagccgtttgcgggaagaactggtgatgaacctgattcaggcagaggagaatactcccgcacttactgaatgggcgcaacggctggggatcgatctcaatcaaccgcgagtggtggctattgttgaggtcgacagcggtcagcttggcgtggacagcgcaatggcggagttacaacaactgcaaaacgcgctgactacgcccgagcgtaataatctggtggcgattgtcagcctaaccgaaatggtggtgttgaaaccggcgttgaactcttttgggcgctgggatgcagaagatcatcgtaagcgagttgaacaactgattacccgcatgaaagagtacggccagctgcgttttcgcgttagtctgggcaactattttaccggtcctggcagtattgcccgatcctatcgtacggcgaaaacgacgatggtggtgggtaaacagcggatgccagaaagtcgctgctatttttatcaggatctgatgttacctgtgttactcgacagtttgcgtggcgactggcaggccaacgaactggcgcgaccgctggcgcggctgaaaacgatggacaataacggcttgctgcgacgaacgctggcggcgtggtttcgccacaatgtgcaaccgctggcaacgagtaaggcgttgtttattcatcgtaataccctggagtatcggcttaatcgtataagcgaactgaccgggcttgatttgggcaattttgatgacaggttgctgctgtatgtggcgttacaactggatgaagagcggtaagttatgcgttaaggttgaggcggcgctggctcattcccctcagcccgaagggtagaggggaatgcccgaattaaccgtcagttcgggattatttacgcgttagtttttccagatcggcttcaatctcgctgatcttattggttacgacactctccaggtgacgtaagtcgtcgaggatcttacgcttaagatcaacttcgctgcggtcacgctggcagatttgatcaagctcatcaatgatataccgtagattcgggctgatttcctggacttctttataaccctgacccacaccatcagcgacgaccgttttacgctgacgcggatatttaaacttaacgctcttggcgaaaaactcgcctttgtctttctggaaatagattttcagaatatcgttgttggcttcctgccggaggctgtaacgatcaatttcttcaggattggtaatacccagacttttcagattgtcgtacatagcgttacctcaaaatgagtcagtaaattgtgcttattttagcatttggcctggcccgcccggctcgactgtgatcgcagaaagcctttttcttccagacttctatcatggcgtaaaaatcaaaaaattacctgctttattctggtgataaaattcacgatttacaccagttccagcatcgttacttccgggcggcagttcagacgcaaaccatacaaactgcccacgccacgggttgtgtagatgtgtctttcgccaaaggcatttaatccggcgacgtaacgtttatcttcgacaggggcaaaaggttcaccaaccaacggtacgcgcagttgcccgccgtgagtatggccgcacagcatcagatcccagggttcatcacgcatgacttctttgctgtcgggattatgcgccagcaccagtcttggcagattggcttcgctggcgggaggcggtttgcattgtccggcccataagtcaccagtgcctaccagttcgaattgcctgttcggcgtggcgatcaccgtagcctggttaaacaacaccgtgatgcccgcacttttcaacgtctcgccaattaagtgatttttttctgtaccaacagggcgatcgtggttgccgaagcaggcaaacgtcggcgcacattcggcaaggggggagagtacgtcactaaacgcgctaaaattcaggctcatatcaaataatacgtaatcgccgcccagtaatatcaaatcgggcttttgttctatgccaagagcaatcgcgtcagaaatcaggcttaaaggaacaaaacgagagtaatggagatcggccagaaaaagaattttgaatggtgctgcgttgtctttaaaaaaggcgaggcggtgacggattaattcaaaccagcctggctcacagtaatgcatataaccgaaaccactgctcgtggctatcgtcgcggcagtagcctgcaaaaatcggcggcgactaatcatcgctcatccctgcaaaaaaatcgggcagcgtcgtgctgcccgtgtgcatacttttagtcgatggtacgcagcagttcgttaatgccgactttgccgcgagttttcgcgtcaactttcttaacgataaccgcacagtagaggctgtatttgccatctttactcggcagattaccactaacaaccacagaccccgccggaacgcgaccgtagtggatttcgccggtttcacggtcgtaaatacgggtgctctgaccaatgtatacgcccatggaaatgacggaaccttcttcgacaatcaccccttcaaccacttcagagcgcgcgccgatgaagcaattatcttcaatgatggttgggttagcctgcagcggttccagcacgccgccgatgcccacgccaccggaaaggtggacgtttttaccaatctgcgcacaagaaccgacggtcgcccaggtatcaaccatggtgccttcatcaacatatgcgccgatgttgacgtaagacggcatcagcacggtgttacgggcaataaacgcaccctgacgtaccgccgctggtggcacaacgcggaagccttctttctggaaacgtgcttcgtcgtagtcggcgaatttcatcggcactttgtcgaagtagcggctttctgccccttcgatcacctgattatcattaatacggaaagagagcagcaccgcttttttcaaccactgatgcgtcacccactgaccgtcaattttttccgctacacgcagtgcgccggaatccagcagggcgatcacctgatttaccgcttcgcgggtaacggtgtctgcattggctggcgtgatctcggcacggcgttcaaaagcggtttcaataatgttctgtaactgctgcattgttaaactcttttcatatcagtaaacacatcaccctttatcgtttggattgagggcctctgtcaaccgctgatgcacttcctgctgcaactcgttattaagcgcacgccggtcagcggtggcaattatgaataaatcttctactcgctcgccaatggttgtaattcgggcaccatgaaggctaattcccagatcggcaaaaattttcccgactcgcgccagcagtccaggttggtcgagggcgatcagttcgaggaagcttttgcggtcggtatgggtcggcaaaaacgttacttcggtttcaacagtaaaatggcgtaatttggcgggttggcgacggggctgcggtggctgccagctactttgcgtcagtacttgctccagaccaaaccgaataacctcatgacgatctgcggacagcgggttgccatcgggttccagcacgataaaggtatccatcgccataccgtcgcgagtggtgaaaatttgtgcgtcgtgaacacttaaattgcggcggtctaattcggcacagacggcggcaaacagataagggcggtccgggctccagataaaaatctcggtgcctccacgcgtagcctgcgggctaagcaataccagcggtttgcttaaatcatgctgtaataaatggcgggcatgccaggccagttgatttgggctatggcggacaaaatagttagcacgacagcgactccaaatttggtgcagcgcctcttcgtcgatgttatccatgcgcagtagtgccagtgcctggagttggtgatggcgaacccgttcgcgcatatccggcgtgttttgcattccgcgtcgtagctgcttttcggtggcaaagtagagctcacgcaacagactttgcttccagctattccacagcgtttcgttggtggcgcaaatgtcagccacagtcaggcataccagatagcgcagacgattttccgtttgcacttcttcggcaaactgcttgatgacttccgggtcctgaatatcgcggcgttgggcggtcacgctcatcaacaggtgctggcgaaccagccaggcgaccagctgtgtttcgcgactgttcagcccgtggagttcggcaaaatgcactacatcctgagcaccgagaatggagtggtcgccgccgcgtcctttggcgatatcgtgaaacagcgcggcgatgaaaatcagctcagtactcggcaggcgcggccagacgtccacacacaacggatggcgctggcgcgtttcttcactggcaaaactctccagtttcagcatcacgcggatagtatgttcatccaccgtgtaggcgtggaacagatcaaactgcatctgcccgacgatatggctccattgcggcatatacgcgccgagcacgctatggcgatgcattggcaatagcccgcgccgcaccgctccggggtgacgcagaatgctcaaaaacagttttcgtgcttccggaatattacacagcggttgttgcagatggcgacgggcatggcgtaactggcgcagcgtggtggagtaaatgccggtgatcgcactgttgtgcaccatggtgtagaacatacgcaagatggcttccggctggcgcataaatagtgtttcatcacgcaggtcgattagcgtaccgcgtagctgaaactcatcgtcgattggacgtggtttttcgtcggcgggaagggcgaggatggcttcatcgaacagttgcagcagcatctggttgagttcactgacgcggcgtgtaacgcggaagtaatccttcatcatccgctcgaccggttcgttaccttcaccactgtaattcagacgctgggcgacgctaagctggcgatcgaataacaggcgattatcgtaacggctgacgaccagatgcagggcaaagcgaatacgccacaatatatgcagacattcgtttaattccgcccgctccgcactggttaagaagccaaacccgaccatttcatccaggcttgttgcgccaaaatgacggcgggccacccattgcagagtgtggatatcgcgcaagccgccagggctgcttttgatgtctggttcaaggttgtagctggtgccatggtaacgctgatggcgctggttctgttcttcaactttcgccgcgtagaacttgtcggaaggccagaatccttcgctgaaaatatgtttttgcagttcgaggaacagcgcaacatcgccaattaataagcgggattcgattaaattggtggcgacggttaaatcgcttaacccttccagcatgcactcttcaagcgtgcgcacgctatgaccgacttccagctttacatcccagagcagcgttaacagctcgcccactttttgcgcctgatcgtccgggagctttttacggcttaaaatcagtaaatcgacgtcactaagtggatgcagctcgccacgaccgtagccaccgacggcgaccaatgccaggtcggcaatctggctgaatcccgcttcaatccataatcgttgcaggagctggtcgataaactcggtgcgcgcctcaatcaactgttctgcagagatcccattgtcaaaggcatcacccagccaacgctggaaagtatcgatatgggcttttatcccaccgacggttaattcatcacggggccagacgcatggattttgcggttgaccgggcagggtggggagagcggtgtttgcgtactgttctggaagggtattcattgtgcgccacccataagattaaattatcgcattaaaaaagccggcattcgccggcttcatcttattcgtcgtggctgattatcgccgggatggtgtcatccttgcgtagcgtcagaatttcgcagccgttatcagtcaccacaatagtatgctcatattgtgcagacaagctgcgatctttggtttttaccgtccagccatctttcatggtgcggatctcttttttacccgcgttgaccattggctcgatggtgaacgtcatcccaggtttcagtacgacgttggtttcacgggagtcatagtgcagcacctgcggttcttcatggaagccgcgaccaataccgtgtccgcaatattcacgaacgacggagaagccttctgcttcgacaaatttctgaatcgccgcaccgatttcgcgcagattaatgcctggttttaccatgcgtagcgccaggtacaggctttcttgcgtgatgcggcacagacgttcgcccatgatggtcggcttaccgacgataaacattttgctggtatcgccgtggaaaccatctttgattacggtgacatcaatgttaacgatatcgccatctttcagcagcttagcatcgtccgggataccgtggcacaccacttcattaatagagatgcaaacggatttcggatagccgtgatagccgaggcaggcagaaaccgcgtgttgttcattaacaatgtaatcattacagatgcgatccagctcgccggtgctgacgcccggtttaacatacggttcgatcatctccagcacttcggcagccagtcggccagcgacgcgcattttttcgatatcttctggggtcttgatagagatagccattaattctgtccatcagcgtcggtgataccgacaatatatatgtaagtgccgtcaatggtatcacacccgggcaaattgagaatcattctgaatttcgccaaacgtgccactgaaggttttctataatagaaaattcgacgtctgatgctgtacacagcgccaacaattattggtgtccacgacgtatttgtggtataaagcgcgccggacttccgatccatttcgtatacacagactggacggaagcgacaatctcactttgtgtaacaacacacacgtatcggcacatattccggggtgccctttggggtcggtaatatgggatacgtggaggcataaccccaacttttatatagaggttttaatcatggcaactgtttccatgcgcgacatgctcaaggctggtgttcacttcggtcaccagacccgttactggaacccgaaaatgaagccgttcatcttcggtgcgcgtaacaaagttcacatcatcaaccttgagaaaactgtaccgatgttcaacgaagctctggctgaactgaacaagattgcttctcgcaaaggtaaaatccttttcgttggtactaaacgcgctgcaagcgaagcggtgaaagacgctgctctgagctgcgaccagttcttcgtgaaccatcgctggctgggcggtatgctgactaactggaaaaccgttcgtcagtccatcaaacgtctgaaagacctggaaactcagtctcaggacggtactttcgacaagctgaccaagaaagaagcgctgatgcgcactcgtgagctggagaaactggaaaacagcctgggcggtatcaaagacatgggcggtctgccggacgctctgtttgtaatcgatgctgaccacgaacacattgctatcaaagaagcaaacaacctgggtattccggtatttgctatcgttgataccaactctgatccggacggtgttgacttcgttatcccgggtaacgacgacgcaatccgtgctgtgaccctgtacctgggcgctgttgctgcaaccgtacgtgaaggccgttctcaggatctggcttcccaggcggaagaaagcttcgtagaagctgagtaataaggcttgataactcccccaaaatagttcgagttgcagaaaggcggcaagctcgagaattcccgggagcttacatcagtaagtgaccgggatgagcgagcgaagataacgcatctgcggcgcgaaatatgaagggggagagcccttatagaccaggtagtacacgtttggttagggggcctgcatatggccccctttttcacttttatatctgtgcggtttaatgccgggcagatcacatctccgaggattttagaatggctgaaattaccgcatccctggtaaaagagctgcgtgagcgtactggcgcaggcatgatggattgcaaaaaagcactgactgaagctaacggcgacatcgagctggcaatcgaaaacatgcgtaagtccggtgctattaaagcagcgaaaaaagcaggcaacgttgctgctgacggcgtgatcaaaaccaaaatcgacggcaactacggcatcattctggaagttaactgccagactgacttcgttgcaaaagacgctggtttccaggcgttcgcagacaaagttctggacgcagctgttgctggcaaaatcactgacgttgaagttctgaaagcacagttcgaagaagaacgtgttgcgctggtagcgaaaattggtgaaaacatcaacattcgccgcgttgctgcgctggaaggcgacgttctgggttcttatcagcacggtgcgcgtatcggcgttctggttgctgctaaaggcgctgacgaagagctggttaaacacatcgctatgcacgttgctgcaagcaagccagaattcatcaaaccggaagacgtatccgctgaagtggtagaaaaagaataccaggtacagctggatatcgcgatgcagtctggtaagccgaaagaaatcgcagagaaaatggttgaaggccgcatgaagaaattcaccggcgaagtttctctgaccggtcagccgttcgttatggaaccaagcaaaactgttggtcagctgctgaaagagcataacgctgaagtgactggcttcatccgcttcgaagtgggtgaaggcatcgagaaagttgagactgactttgcagcagaagttgctgcgatgtccaagcagtcttaattatcaaaaaggagccgcctgagggcggcttctttttgtgcccatcttgtaaattcagctaacccttgtggggctgcgctgaaaagcgacgtacaatgtcgctagtattaattcatttcaatcgttgacagtctcaggaaagaaacatggctaccaatgcaaaacccgtctataaacgcattctgcttaagttgagtggcgaagctctgcagggcactgaaggcttcggtattgatgcaagcatactggatcgtatggctcaggaaatcaaagaactggttgaactgggtattcaggttggtgtggtgattggtgggggtaacctgttccgtggcgctggtctggcgaaagcgggtatgaaccgcgttgtgggcgaccacatggggatgctggcgaccgtaatgaacggcctggcaatgcgtgatgcactgcaccgcgcctatgtgaacgctcgtctgatgtccgctattccattgaatggcgtgtgcgacagctacagctgggcagaagctatcagcctgttgcgcaacaaccgtgtggtgatcctctccgccggtacaggtaacccgttctttaccaccgacagtgcagcttgcctgcgtggtatcgaaattgaagccgatgtggtgctgaaagcaaccaaagttgacggcgtgtttaccgctgatccggcgaaagatccaaccgcaaccatgtacgagcaactgacttacagcgaagtgctggaaaaagagctgaaagtcatggacctggcggccttcacgctggctcgtgaccataaattaccgattcgtgttttcaatatgaacaaaccgggtgcgctgcgccgtgtggtaatgggtgaaaaagaagggactttaatcacggaataattcccgtgatggataaataagggtaagattccgcgtaagtatcgcgggggcgtaagtctggttataaggcgttattgttgcaggcagtttggtcacggccagcgcgcagcaaccggagcgtacaaaagtacgtgaggatggcgagcactgcccggggccaaaatggcaaataaaatagcctaataatccagacgattacccgtaatatgtttaatcagggctatacttagcacacttccactgtgtgtgactgtctggtctgactgagacaagttttcaaggattcgtaacgtgattagcgatatcagaaaagatgctgaagtacgcatggacaaatgcgtagaagcgttcaaaacccaaatcagcaaaatacgcacgggtcgtgcttctcccagcctgctggatggcattgtcgtggaatattacggcacgccgacgccgctgcgtcagctggcaagcgtaacggtagaagattcccgtacactgaaaatcaacgtgtttgatcgtagtatgtctccggccgttgaaaaagcgattatgacgtccgatcttggcctgaacccgaactctgcgggtagcgacatccgtgttccgctgccgccgctgacggaagaacgtcgtaaagatctgaccaaaatcgttcgtggtgaagcagaacaagcgcgtgttgcagtacgtaacgtgcgtcgtgacgcgaacgacaaagtgaaagcactgttgaaagataaagagatcagcgaagacgacgatcgccgttctcaggacgatgtacagaaactgactgatgctgcaatcaagaaaattgaagcggcgctggcagacaaagaagcagaactgatgcagttctgatttcttgaacgacaaaaacgccgctcagtagatccttgcggatcggctggcggcgttttgctttttattctgtctcaactctggatgtttcatgaagcaactcaccattctgggcagcaccggcagcattggttgcagcacgctggacgtggtgcgccataatcccgaacacttccgcgtagttgcgctggtggcaggcaaaaatgtcactcgcatggtagaacagtgcctggaattctctccccgctatgccgtaatggacgatgaagcgagtgcgaaacttcttaaaacgatgctacagcaacagggtagccgcaccgaagtcttaagtgggcaacaagccgcttgcgatatggcagcgcttgaggatgttgatcaggtgatggcagccattgttggcgctgctgggctgttacctacgcttgctgcgatccgcgcgggtaaaaccattttgctggccaataaagaaagtctggttacctgcggacgtctgtttatggacgccgtaaagcagagcaaagcgcaattgttaccggtcgatagcgaacataacgccatttttcagagtttaccgcaacctatccagcataatctgggatacgctgaccttgagcaaaatggcgtggtgtccattttacttaccgggtctggtggccctttccgtgagacgccattgcgcgatttggcaacaatgacgccggatcaagcctgccgtcatccgaactggagcatggggcgtaaaatttctgtcgatagcgctaccatgatgaacaaaggtctggaatacattgaagcgcgttggctgtttaacgccagcgccagccagatggaagtgctgattcacccgcagagtgtgattcacagtatggtgcgctatcaggacggcagtgttctggcgcagctgggggaaccggatatgcgtacgccaattgcccacaccatggcatggccgaatcgcgtgaactctggcgtgaagccgctcgatttttgcaaactaagtgcgttgacatttgccgcaccggattatgatcgttatccatgcctgaaactggcgatggaggcgttcgaacaaggccaggcagcgacgacagcattgaatgccgcaaacgaaatcaccgttgctgcttttcttgcgcaacaaatccgctttacggatatcgctgcgttgaatttatccgtactggaaaaaatggatatgcgcgaaccacaatgtgtggacgatgtgttatctgttgatgcgaacgcgcgtgaagtcgccagaaaagaggtgatgcgtctcgcaagctgaggataatccggctacagagagtcgcgctatttgttagcgtagggcttcagtgatatagtctgcgccatctgatcgtaagtagttggctttataaggtcagatatgccgtggttttacacggcttttttttgtataggcttcagtattcctgagtaccgtaaaccctgtcagggaataaaaaacgcgtgatgttgtctgctactcaaccacttagcgaaaaattgccagcgcatggctgccgtcatgttgcgatcattatggacggcaatggccgctgggcaaaaaagcaagggaagattcgtgcctttgggcataaagccggggcaaaatccgtccgccgggctgtctcttttgcggccaacaacggtattgaggcgttaacgctgtatgcctttagtagtgaaaactggaaccgaccagcgcaggaagtcagtgcgttaatggaactgtttgtgtgggcgctcgatagcgaagtaaaaagtctgcaccgacataacgtgcgtctgcgtattattggcgataccagtcgctttaacagccgtttgcaagaacgtattcgtaaatctgaagcgctaacagccgggaataccggtctgacgctgaatattgcggcgaactacggtggacgttgggatatagtccagggagtcaggcaactggctgaaaaggtgcagcaaggaaacctgcaaccagatcagatagatgaagagatgctaaaccagcatgtctgtatgcatgaactggcccctgtagatttagtaattaggactgggggggagcatcgcattagtaactttttgctttggcaaattgcctatgccgaactttactttacagatgttctctggcccgatttcgatgaacaagactttgaaggggcgttaaatgcctttgctaatcgagagcgtcgtttcggcggcaccgagcccggtgatgaaacagcctgatgggggtcgcttttgctgaagtatcgcctgatatctgcttttgtgttaatacccgtcgtcatcgcggcgttgtttctgttgccgccggtggggttcgccattgtaacgctggtggtctgcatgctggcagcgtgggaatggggacagcttagcggttttaccactcgtagccagcgagtatggttggcggtgttatgcgggttattgttggcgctgatgctttttctgttgccggaatatcaccgaaatattcatcaaccgctggttgaaatcagtctttgggctagcctgggttggtggattgtcgcgctattgctggtgctgttttacccaggttccgcagcaatctggcgtaactctaaaacattgcgccttatttttggcgtgctaaccattgttcccttcttctggggcatgctggcgttacgggcctggcactatgacgagaatcattacagtggcgcaatatggttgctctatgtcatgatcctggtatggggcgctgactccggcgcatatatgtttggcaaattgtttggtaaacataagctggcaccgaaggtttctccgggtaaaacctggcaaggctttatcggtggactcgctactgcagcggtaatcagttggggttatggcatgtgggcgaatctcgacgtcgctcccgtcaccttactcatttgctctattgtcgcagcgttagccagtgtgctcggcgatctgaccgagagtatgtttaagcgtgaagcaggaattaaggacagcggtcatttaattccaggacacggtggtattttagatcgtattgatagcctgacggctgcggtaccggtctttgcttgcttgttgttactggtattcaggacgctttaacggaaggtaatatgctgagttttctctgggatttggctagcttcatcgttgcactgggtgtacttatcaccgtgcatgaatttggtcatttctgggttgcccggcgttgtggtgttcgcgttgagcgtttcagtatagggtttggtaaggcgctctggcggcgaactgataagctcggcaccgaatatgttatcgccctgatcccgttgggcggttatgtcaaaatgctggatgagcgcgcagaaccggtcgttccggaactccgccaccatgccttcaataataaatctgtcggccaacgagcggcgattattgccgcaggtccggttgcaaacttcatttttgctatctttgcctactggctggtttttattattggtgtgcctggcgtacgtccggtggttggcgaaatagcagccaatagcatagctgcggaagcacaaattgcaccaggtacggaactaaaagccgtagatggtatcgaaacgcctgattgggatgccgtgcgtttgcagttggtcgataaaattggcgatgaaagcaccaccattacagtagcgccatttggcagcgaccaacggcgggatgtaaagctcgatttacgtcactgggcgtttgagcctgataaagaagatccggtatctagcctggggattcgtcctcgtgggccgcaaattgaacctgtactggaaaatgtgcagccaaacagcgcggcaagcaaggcaggtttgcaagcaggcgacaggatcgttaaagtcgatggtcagcccttaacgcagtgggtgacctttgtgatgcttgtccgggataacccgggtaaatccttagcgttagaaatcgaaaggcaggggagtcccttgtctttgacattaatcccggagagtaaaccgggtaatggtaaagcgattggttttgtcggtattgagccgaaagtcattcctttgccagatgagtataaagttgtacgccagtatgggccgttcaacgccatcgtcgaagccacggacaaaacgtggcagctgatgaagctgacggtcagtatgctgggaaaattgatcaccggtgatgtgaaactgaacaacctcagtgggccgatctctatcgccaagggggctgggatgacagcggaactcggggttgtttattacctgccgtttcttgcgcttattagcgtgaacttagggataattaacctgtttccgttgcccgtacttgacggggggcatctgctgttccttgcgatcgaaaagatcaagggcggaccggtatccgagcgggttcaagacttttgttatcgcattggcagcattctgctggtgctgttaatggggcttgcacttttcaatgatttctctcggttatgagagttagttaggaagaacgcataataacgatggcgatgaaaaagttgctcatagcgagcctgctgtttagcagcgccaccgtatacggtgctgaagggttcgtagtgaaagatattcatttcgaaggccttcagcgtgtcgccgttggtgcggccctcctcagtatgccggtgcgcacaggcgacacggttaatgatgaagatatcagtaataccattcgcgctctgtttgctaccggcaactttgaggatgttcgcgtccttcgtgatggtgatacccttctggttcaggtaaaagaacgtccgaccattgccagcattactttctccggtaacaaaagcgtgaaagatgacatgctgaagcaaaacctcgaggcttctggtgtgcgtgtgggcgaatccctcgatcgcaccaccattgccgatatcgagaaaggtctggaagacttctactacagcgtcggtaaatatagcgccagcgtaaaagctgtcgtgaccccgctgccgcgcaaccgtgttgacctaaaactggtgttccaggaaggtgtgagtgctgaaatccagcaaattaacattgttggtaaccatgctttcaccaccgacgaactgatctctcatttccaactgcgtgacgaagtgccgtggtggaacgtggtaggcgatcgtaaataccagaaacagaaactggcgggcgaccttgaaaccctgcgcagctactatctggatcgcggttatgcccgtttcaacatcgactctacccaggtcagtctgacgccagataaaaaaggtatttacgtcacggtgaacatcaccgaaggcgatcagtacaagctttctggcgttgaagtgagcggcaaccttgccgggcactccgctgaaattgagcagctgactaagatcgagccgggtgagctgtataacggcaccaaagtgaccaagatggaagatgacatcaaaaagcttctcggtcgctatggttatgcctatccgcgcgtacagagcatgcccgaaattaacgatgccgacaaaaccgttaaattacgtgtgaacgttgatgcgggtaaccgtttctacgtgcgtaagatccgttttgaaggtaacgataccagcaaagatgccgtcctgcgtcgcgaaatgcgtcagatggaaggtgcatggctggggagcgatctggtcgatcagggtaaggagcgtctgaatcgtctgggcttctttgaaactgtcgataccgatacccaacgtgttccgggtagcccggaccaggttgatgtcgtctacaaggtaaaagagcgcaacaccggtagcttcaactttggtattggttacggtactgaaagtggcgtgagcttccaggctggtgtgcagcaggataactggttaggtacaggttatgctgttggtatcaacgggaccaaaaacgattaccagacctatgctgaactgagcgtaaccaacccgtacttcaccgtagatggcgtaagcctcggtggtcgtctcttctataatgacttccaggcagatgacgccgacctgtccgactataccaacaagagttatggtacagacgtgacgttgggcttcccgattaacgaatataacagcctgcgtgcaggtctgggttatgtacataactccctgtccaacatgcagcctcaggttgcgatgtggcgttatctgtactctatgggtgaacatccgagcacctctgatcaggataacagcttcaaaacggacgacttcacgttcaactatggttggacctataacaagcttgaccgtggttacttcccgacagatggtagtcgtgtcaacctgaccggtaaagtgaccattcctggaagcgataacgaatactacaaagtgacgttagacacggcgacttatgtgccgatcgatgacgatcacaaatgggttgttctggggcgtacccgctggggttatggtgatggtttaggcggcaaagagatgccgttctacgagaacttctatgccggtggttccagcaccgtgcgtggcttccagtccaataccattggtccgaaagcagtttacttcccgcatcaggccagtaattatgatccggactatgattacgaatgtgcgactcaggacggcgcgaaagacctgtgtaaaagcgatgatgctgtaggcggtaacgccatggcggttgccagcctcgagttcatcaccccgacgccgtttattagcgataagtatgctaacagcgttcgtacttccttcttctgggatatgggtaccgtttgggatacaaactgggattccagccaatattctggatatccggactatagtgatccaagcaatatccgtatgtctgcgggtatcgcattacaatggatgtccccattggggccgttggtgttctcctacgcccagccgttcaaaaagtacgatggagacaaggcagaacagttccagtttaacatcggtaaaacctggtaagtgttctccacaaaggaatgtagtggtagtgtagcgatgactttaggcgatcaatataagatcgccgggccacgcaaagaactgcaccctccggtgcaaatgggatggtaaggagtttattgtgaaaaagtggttattagctgcaggtctcggtttagcactggcaacttctgctcaggcggctgacaaaattgcaatcgtcaacatgggcagcctgttccagcaggtagcgcagaaaaccggtgtttctaacacgctggaaaatgagttcaaaggccgtgccagcgaactgcagcgtatggaaaccgatctgcaggctaaaatgaaaaagctgcagtccatgaaagcgggcagcgatcgcactaagctggaaaaagacgtgatggctcagcgccagacttttgctcagaaagcgcaggcttttgagcaggatcgcgcacgtcgttccaacgaagaacgcggcaaactggttactcgtatccagactgctgtgaaatccgttgccaacagccaggatatcgatctggttgttgatgcaaacgccgttgcttacaacagcagcgatgtaaaagacatcactgccgacgtactgaaacaggttaaataagtaatgcctagtattcgactggctgatttagcgcagcagttggatgcagaactacacggtgatggcgatatcgtcatcaccggcgttgcgtccatgcaatctgcacaaacaggtcacattacgttcatggttaacccaaaataccgtgagcatttaggcttgtgccaggcgtccgcggttgtcatgacccaggacgatcttcctttcgcgaaaagtgccgcactggtagtgaagaatccctacctgacttacgcgcgcatggcgcaaattttagataccacgccgcagcccgcgcagaacattgcacccagtgcggtgatcgacgcgacggcgaagctgggtaacaacgtaagcattggcgctaacgcggtgattgagtccggcgttgaactgggcgataacgtgattatcggtgccggttgcttcgtaggtaaaaacagcaaaatcggtgcaggtagccgtctctgggcgaacgtaaccatttaccatgagatccagatcggtcagaattgcctgatccagtccggaacagtggtaggcgcagacggctttggttatgccaacgatcgtggtaactgggtgaagatcccacagattggtcgcgtaattattggcgatcgcgtggagatcggtgcctgcacaaccatcgatcgcggcgcgctggatgacactattattggcaatggcgtgatcattgataaccagtgccagattgcacataacgtcgtgattggcgacaatacggcggttgccggtggcgtcattatggcgggcagcctgaaaattggtcgttactgcatgatcggcggagccagcgtaatcaacgggcatatggaaatatgcgacaaagtgacggttacgggcatgggtatggtgatgcgtcccatcactgaaccaggcgtctattccagtggcattccgctgcaacccaacaaagtctggcgcaaaaccgctgcactggtgatgaacattgatgacatgagcaagcgtctgaaaagccttgagcgcaaggttaatcaacaagactaacgttccatcttttgttcgccaaactttacggcctgtctcattcttacgattgcggcaggccgtgttattattgtcgtttcttatattttgacaggaagagtatcttgactactaacactcatactctgcagattgaagagattttagaacttctgccgcaccgtttcccgttcttactggtggatcgcgtgctggattttgaagaaggtcgttttctgcgcgcagtaaaaaatgtctctgtcaatgagccattcttccagggccatttccctggaaaaccgattttcccgggtgtgctgattctggaagcaatggcacaggcaacaggtattctggcgtttaaaagcgtaggaaaactggaaccgggtgagctgtactacttcgctggtattgacgaagcgcgcttcaagcgcccggtcgtgcctggcgatcaaatgatcatggaagtcactttcgaaaaaacgcgccgcggcctgacccgttttaaaggggttgctctggtcgatggtaaagtagtttgcgaagcaacgatgatgtgtgctcgtagccgggaggcctgatacgtgattgataaatccgcctttgtgcatccaaccgccattgtggaagagggcgcgagtattggcgcgaacgcacacattggtcctttttgtatcgttggaccccatgtcgaaattggtgagggtaccgtactgaaatctcacgttgtcgtgaatggtcatactaaaattggccgcgataatgagatttatcagttcgcctccatcggcgaagttaaccaggatctgaaatatgctggcgaaccgacccgtgtggaaatcggcgatcgtaaccgcattcgcgaaagcgtcaccattcatcgtggcacagtccagggcggtggattgacgaaggtgggcagcgacaacttactgatgatcaacgcgcacattgcgcacgattgtacggtaggtaaccgctgtattctcgccaacaacgcaacgctggcgggtcacgtaagcgttgacgacttcgcgatcatcggcggcatgaccgcagtccatcagttctgcatcattggtgcgcacgtgatggttggcggctgctccggtgtggcgcaggacgtccctccttatgtcattgcgcagggtaaccacgcaacgccgttcggtgtcaatatcgaagggctgaagcgccgcggattcagccgtgaggcgattaccgctatccgcaatgcgtataagctgatttatcgtagcggtaaaacgctcgatgaagtgaaaccggaaattgctgaactggcggaaacatatccggaagtgaaagcctttaccgatttctttgcacgcagtacgcgcggtctgattcgttaatgactgaacagcgtccattaacgattgccctggtcgccggagaaacctccggcgatatcctgggggccggtttaatccgcgctctgaaagaacatgtgcccaacgcccgctttgttggtgttgccgggccacgaatgcaggctgaaggctgcgaagcctggtacgaaatggaagaactggcggtgatgggcattgttgaagtgctcggtcgtctgcgtcgcttactgcatattcgtgccgatctgacaaagcgttttggcgaactgaagccagatgtttttgttggtattgatgcgcctgacttcaatattactcttgaaggtaacctcaaaaagcagggtatcaaaaccattcattacgtcagtccgagtgtctgggcgtggcgacagaaacgtgttttcaaaataggcagagccaccgatctggtgctcgcatttctgcctttcgaaaaagcgttttatgacaaatacaacgtaccgtgccgctttatcggtcataccatggctgatgccatgccattagatccagataaaaatgccgcccgtgatgtgctggggatccctcacgatgcccactgcctggcgttgctaccggggagccgtggtgcagaagttgaaatgcttagtgccgatttcctgaaaacggcccagcttttgcgccagacatatccggatctcgaaatcgtggtgccactggtgaatgccaaacgccgcgagcagtttgaacgcatcaaagctgaagtcgcgccagaccttagtgttcatttgctggatgggatgggccgtgaggcgatggtcgccagcgatgcggcgctactggcgagcggtacggcagccctggagtgtatgctggcgaaatgcccgatggtggtgggatatcgcatgaagccttttaccttctggttggcgaagcggctggtgaaaactgattatgtcagcctgccaaatctgctggcgggcagagagttagtcaaagaattattgcaggaagagtgtgagccgcaaaaactggctgcggcgctgttaccgctgttggcgaacgggaaaaccagccacgcgatgcacgataccttccgtgaactgcatcagcagatccgctgcaatgccgatgagcaggcggcacaagccgttctggagttagcacaatgatcgaatttgtttatccgcacacgcagctggttgcgggtgtggatgaagtcggacgcgggccgttagttggcgcggtcgtcaccgctgcggtgatccttgacccggcgcgcccgattgccgggctgaatgattccaaaaagctgagcgaaaaacgccgtctggcgctctatgaagagatcaaagagaaagcgttgagctggagtctgggccgcgcggaaccccacgaaatcgacgagctgaacattcttcatgcgaccatgctggcgatgcagcgtgccgtcgctgggctgcatattgcgccggaatatgtgttgattgatggtaaccgctgcccgaaattaccgatgcctgcgatggctgtggtgaaaggcgatagccgcgtaccggaaatcagtgccgcgtctatcctggcgaaagtgacgcgtgacgccgaaatggcggcgctggatattgttttcccgcaatatggttttgcccaacacaaagggtacccaaccgcttttcatctggaaaaactggctgaacacggcgcgaccgaacaccatcggcgcagctttgggcctgtcaaacgcgcactgggacttgcgtcctgattcttgtgtcgagattaagtaaaccggaatctgaagatgtctgaaccacgtttcgtacacctgcgggtgcacagcgactacagcatgatcgatggcctggccaaaaccgcaccgttggtaaaaaaggcggcggcgttgggtatgccagcactggcgatcaccgatttcaccaacctttgtggtctggtgaagttctacggagcgggacatggcgcagggattaagcctatcgtcggggcagattttaacgtccagtgcgacctgctgggtgatgagttaacccacctgacggtactggcggcgaacaataccggctatcagaatctgacgttgctgatcagtaaagcgtatcagcgcgggtacggtgccgccgggccgatcatcgatcgcgactggcttatcgaattaaacgaagggttgatccttctttccggcggacgcatgggcgacgtcggacgcagtcttttgcgtggtaacagcgcgctggtagatgagtgtgtcgcgttttatgaagaacacttcccggatcgctattttctcgagctgatccgcaccggcaggccggatgaagaaagctatctgcacgcggcggtggaactggcggaagcgcgcggtttgcccgtcgtggcgaccaacgacgtgcgctttatcgacagcagcgactttgacgcacacgaaatccgcgtcgcgatccacgacggctttaccctcgacgatcctaaacgcccgcgtaactatagcccgcagcaatatatgcgtagcgaagaggagatgtgtgagctgtttgccgacatccccgaagcccttgccaacaccgttgagatcgccaaacgctgtaacgtaaccgtgcgtcttggtgaatacttcctgccgcagttcccgaccggggacatgagcaccgaagattatctggtcaagcgtgcaaaagagggcctggaagagcgtctggcctttttattccctgatgaggaagaacgtcttaagcgccgcccggaatatgacgaacgtctggagactgaacttcaggttatcaaccagatgggcttcccgggctacttcctcatcgttatggaatttatccagtggagcaaagataacggcgtaccggtagggccaggccgtggctccggtgcgggtagtctggtggcctacgcgctgaaaatcaccgacctcgatccgctggaatttgacctgctgttcgaacgtttccttaacccggaacgtgtctccatgcctgacttcgacgttgacttctgtatggagaaacgcgatcaggttatcgagcacgtagcggacatgtacggtcgtgatgcggtaagccagatcatcaccttcggtacaatggcggcgaaagcggtgatccgcgacgtaggccgcgtgctggggcatccgtacggctttgtcgatcgtatcagcaaactgatcccgcccgatccggggatgacgctggcgaaagcgtttgaagccgagccgcagctgccggaaatctacgaagcggatgaagaagttaaggcgctgatcgacatggcgcgcaaactggaaggggtcacccgtaacgccggtaagcacgccggtggggtggttatcgcgccgaccaaaattaccgattttgcgccgctttactgcgatgaagagggcaaacatccggtcacccagtttgataaaagcgacgttgaatacgccggactggtgaagttcgacttccttggtttgcgtacgctcaccatcatcaactgggcgctggagatgatcaacaagcggcgggcgaagaatggcgagccgccgctggatatcgctgcgatcccgctggatgataagaaaagcttcgacatgctgcaacgcagcgaaaccacggcggtattccagcttgaaagccgcggcatgaaggacctgatcaagcgtctacaacctgactgcttcgaagatatgatcgccctagtggcactgttccgccccggtccgttgcaaagtgggatggtggataactttatcgaccgtaaacatggtcgtgaagagatctcctatccggacgtacagtggcagcatgaaagcctgaaaccggtactggagccaacctacggcattatcctgtatcaggaacaggtcatgcagattgcgcaggtgctttctggttataccctcggtggcgcggatatgctgcgtcgtgcgatgggtaagaaaaagccggaagagatggctaagcaacgttctgtatttgctgaaggtgcagaaaagaacggaatcaacgctgaactggcgatgaaaatcttcgacctggtggagaaattcgctggttacggatttaacaaaagccactctgcggcctatgctttggtgagttatcaagcgttatggctgaaagcgcactatcctgcggagtttatggcggcggtaatgaccgccgatatggacaacaccgagaaggtggtgggtctggtggatgagtgctggcggatggggctgaaaatcctgccaccagatataaactccggtctttaccatttccacgtcaacgacgacggcgaaatcgtgtatggtattggcgcgatcaaaggggtcggtgaaggtccgattgaggccatcatcgaagcccgtaataaaggcggctacttccgcgaactgtttgatctctgcgcccgtaccgacaccaaaaagttgaaccgtcgcgtgctggaaaaactgatcatgtccggggcgtttgaccgtcttgggccacatcgcgcagcgctgatgaacagcctgggcgatgcgttaaaagcggcagatcaacacgcgaaagcggaagctatcggtcaggccgatatgttcggcgtgctggccgaagagccggaacaaattgaacaatcctacgccagctgccaaccgtggccggagcaggtggtattagatggggaacgtgaaacgttaggcctgtacctgaccggacaccctatcaaccagtatttaaaagagattgagcgttatgtcggaggcgtaaggctgaaagacatgcacccgacagaacgtggtaaagtcatcacggctgcggggctcgttgttgccgcgcgggttatggtcaccaagcgcggcaatcgtatcggtatctgcacgctggatgaccgttccgggcggctggaagtgatgttgtttactgacgccctggataaataccagcaattgctggaaaaagaccgcatacttatcgtcagcggacaggtcagctttgatgacttcagcggtgggcttaaaatgaccgctcgcgaagtgatggatattgacgaagcccgggaaaaatatgctcgcgggcttgctatcagcctgacggacaggcaaattgatgaccagcttttaaaccgactccgtcagtctctggaaccccaccgctctgggacaattccagtacatctctactatcagagggcggatgcacgcgcgcggttgcgttttggcgcgacgtggcgtgtctctccgagcgatcgtttattaaacgatctccgtggcctcattggtagcgagcaggtggaactggagtttgactaatacaggaatactatgagtctgaatttccttgattttgaacagccgattgcagagctggaagcgaaaatcgattctctgactgcggttagccgtcaggatgagaaactggatattaacatcgatgaagaagtgcatcgtctgcgtgaaaaaagcgtagaactgacacgtaaaatcttcgccgatctcggtgcatggcagattgcgcaactggcacgccatccacagcgtccttataccctggattacgttcgcctggcatttgatgaatttgacgaactggctggcgaccgcgcgtatgcagacgataaagctatcgtcggtggtatcgcccgtctcgatggtcgtccggtgatgatcattggtcatcaaaaaggtcgtgaaaccaaagaaaaaattcgccgtaactttggtatgccagcgccagaaggttaccgcaaagcactgcgtctgatgcaaatggctgaacgctttaagatgcctatcatcacctttatcgacaccccgggggcttatcctggcgtgggcgcagaagagcgtggtcagtctgaagccattgcacgcaacctgcgtgaaatgtctcgcctcggcgtaccggtagtttgtacggttatcggtgaaggtggttctggcggtgcgctggcgattggcgtgggcgataaagtgaatatgctgcaatacagcacctattccgttatcagcccggaaggttgtgcgtccattctgtggaagagcgccgacaaagcgccgctggcggctgaagcgatgggtatcattgctccgcgtctgaaagaactgaaactgatcgactccatcatcccggaaccactgggtggtgctcaccgtaacccggaagcgatggcggcaagcttgaaagcgcaactgctggcggatctggccgatctcgacgtgttaagcactgaagatttaaaaaatcgtcgttatcagcgcctgatgagctacggttacgcgtaattcgcaaaagttctgaaaaagggtcacttcggtggcccttttttatcgccacggtttgagcaggctatgattaaggaaggattttccaggaggaacacatgaacatcattgccattatgggaccgcatggcgtcttttataaagatgagcccatcaaagaactggagagcgcgctggtggcgcaaggctttcagattatctggccacaaaacagcgttgatttgctgaaatttatcgagcataaccctcgaatttgcggcgtgatttttgactgggatgagtacagtctcgatttatgtagcgatatcaatcagcttaatgaatatctcccgctttatgccttcatcaacacccacagcacgatggatgtcagcgtgcaggatatgcggatggcgctctggttttttgaatatgcgctggggcaggcggaagatatcgccattcgtatgcgtcagtacaccgacgaatatcttgataacattacaccgccgttcacgaaagccttgtttacctacgtcaaagagcggaagtacaccttttgtacgccggggcatatgggcggcaccgcatatcaaaaaagcccggttggctgtctgttttatgatttttcggcgggaatactcttaaggctgatgtctctattagcgtcaccgagcttggtagcttgctcgaccacaccgggccacacctggaagcggaagagtacatcgcgcggacttttggcgcggaacagagttatatcgttaccaacggaacaagcacgagcaacaaaattgtgggtatgtacgccgcgccatccggcagtacgctgttgatcgaccgcaattgtcataaaagcctggcgcatctgttgatgatgaacgatgtagtgccagtctggctgaaaccgacgcgtaatgcgttggggattcttggtgggatcccgcgccgtgaatttactcgcgacagcatcgaagagaaagtcgctgctaccacgcaagcacaatggccggttcatgcggtgatcaccaactccacctatgatggcttgctctacaacaccgactggatcaaacagacgctggatgtcccgagcattcacttcgattctgcctgggtgccgtacacccattttcatccgatctaccagggtaaaagtggtatgagcggcgagcgtgttgcgggaaaagtgatcttcgaaacgcaaagcacccacaaaatgctggcggcgttaagccaggctagcctgatccacattaaaggcgagtatgacgaagaggcctttaacgaagcctttatgatgcataccaccaccagccccagttatcccattgttgctagcgttgagacggcggcggcgatgctgcgtggtaatccgggcaaacggctgattaaccgtagtgtagaacgagctctgcattttcgcaaagaggtccagcggctgcgggaagagtctgacggttggtttttcgatatctggcaaccgccgcaggtggatgaagccgaatgctggcccgttgcgcctggcgaacagtggcacggctttaacgatgcggatgccgatcatatgtttctcgatccggttaaagtcactattttgacaccggggatggacgagcagggcaatatgagcgaggaggggatcccggcggcgctggtagcaaaattcctcgacgaacgtgggatcgtagtagagaaaaccggcccttataacctgctgtttctctttagtattggcatcgataaaaccaaagcaatgggattattgcgtgggttgacggaattcaaacgctcttacgatctcaacctgcggatcaaaaatatgctacccgatctctatgcagaagatcccgatttctaccgcaatatgcgtattcaggatctggcacaagggatccataagctgattcgtaaacacgatcttcccggtttgatgttgcgggcattcgatactttgccggagatgatcatgacgccacatcaggcatggcaacgacaaattaaaggcgaagtagaaaccattgcgctggaacaactggtcggtagagtaagcgcaaatatgatcctgccttatccaccgggcgtaccgctgttgatgcctggagaaatgctgaccaaagagagccgcacagtactcgattttctactgatgctttgttccgtcgggcaacattaccccggttttgaaacggatattcacggcgcgaaacaggacgaagacggcgtttaccgcgtacgagtcctaaaaatggcgggataacttgccagagcggcttccgggcgagtaacgtgctgttaacaaataaaggagacgttatgctgggtttaaaacaggttcaccatattgcgattattgcgacggattatgcggtgagcaaagctttctactgcgatattcttggtttcacgctgcaaagcgaagtctatcgcgaagcgcgcgacagttggaaaggggatttggcgcttaatgggcaatatgtgattgagcttttcagttttccgttcccgccggaacgacccagccgaccggaagcttgcggtctgcgtcatctggcttttagcgttgatgacatcgatgcggcagtggcgcaccttgaaagccataacgtgaagtgtgaaaccatccgtgtcgatccatacacgcaaaaacgcttcaccttctttaacgatccggacgggctgccgttggaactgtatgagcagtaaggcttgtcatcgccgcatttgcccggtaacgtgccgggcattgctactgtaaaatcgcaccatcatgacactcacgctcaatagacaacttctcaccagtcgccagattctggtggcctttagcggcgggcttgactccaccgttctgctgcatcagttggtgcagtggcggacggaaaatccgggtgtcgctctgcgcgctattcatgtgcatcacggtttaagtgccaatgccgatgcctgggttacgcattgcgaaaacgtctgccaacagtggcaggtgccgctggtggtcgaacgcgtacaacttgcgcaagaaggactgggcattgaggcccaggcgcggcaggcacgttatcaggcatttgcccgcaccttgttgcccggtgaagtgctggtcaccgcgcaacatctcgacgatcaatgtgaaacctttctgctggcgctaaaacgcggcagtggccctgccgggcttagcgctatggcggaagtcagcgagtttgccggaacgcggcttattcgcccgttgctcgcccgcacgcggggggaactggtgcagtgggcgcgtcagtatgatttacgctggattgaagacgaaagtaatcaggacgacagttacgatcgtaactttctgcgcctgcgcgtagtgccgttattgcagcagcgttggccgcattttgccgaagcaacggcccgcagcgccgcactttgtgctgaacaagagagcctgctggatgaactgctggcagatgatttagcacactgtcaaagcccgcaggggacgctgcagattgtgccaatgctggcgatgagtgatgcccgccgcgcggcgattatccgccgctggctggcagggcagaatgcaccgatgccttcccgcgacgcgttggtgaggatctggcaggaagtggcgctggcgcgggaagatgccagtccctgtttacgtttgggcgcgtttgaaatccgacgctatcagagccaactgtggtggattaaatccgtcaccgggcaaagcgaaaacattgtgccgtggcagacgtggcttcaaccgctggaattaccggcggggctgggaagtgtacagcttaatgcgggaggcgatattcgccctccgcgtgcagacgaagcggtcagcgtgcgtttcaaagcgccaggattgctgcatattgtcgggcgtaacggcggacgtaagctaaagaaaatctggcaagagctgggcgtgccgccgtggctacgtgacaccacgccactgctgttttatggcgaaacgctgattgcggcggcaggggtatttgtgacgcaagaaggtgtggctgaaggtgagaatggcgtaagttttgtctggcagaaaacgcttagttaagtgaaagccggataagacgcatcaaacgtcgcatccggcgaaagtcaatcaggattcgcttaccaccaccgtaccgatttccgggtggctaaagctggtaattttatccagacgcagctcgcgggtttcgccagcggcctcgacgaccaggtactccacatttttgcgggagactaaatcactggcttttgcctgcaatttttcgccatctttcagctcaagtgtcagcattaaatgatgctggcaggcgagctcaagattatcgtaatcatcacaattgattggttgatacgtatcattcattgacataatcgctcaccagtaagtttgccgcagcgtatgctgctttttccctgacagcctcagaaagggcgtcgtcggcagccatttcattcagcactttcaaaacgcagcccagcgcgtccggaacgtatcctaagtctccgctggcgatttccgcgtaccgcttgcgtattaactcacaatatttttccacatgccctcctgtcagcactctgacttaaccgtggatgcaagtctaagcctacgaagataaactctgtttcgcaaggtgactataccacactcatttctgcaatatcagcgccgcaactgcacgtattccgttacaatggcctcctgattcgaaaggagttttcttatggcgcttaaagcgacaatttataaagcgacggttaatgtggccgatctcgaccgcaaccagtttctcgatgcctctctgacgctggcgcgccatcctagtgaaacccaggagcgtatgatgctgcgcttgctggcgtggctgaaatatgctgatgaacgtctgcaatttacccgtggtttgtgtgccgatgatgagccggaagcgtggctgcgtaacgatcacctgggcattgatttgtggattgagctggggctgccggatgagcggcggattaagaaagcctgcacccaggccgcagaagtggcgctgtttacctataatagtcgggcggcgcaaatctggtggcagcaaaatcagagcaaatgtgtgcagtttgccaatctttccgtctggtatctggacgatgaacaactggcgaaagtaagcgcctttgccgatcgtaccatgacgctgcaggcaacgattcaggatggcgtgatctggttaagcgatgataagaataatctggaagtgaacttaaccgcctggcaacaacctagttgaactaaaccgcctggcaacaaccttcatgattgtgatttcccgacatgttgctattcccgatggtgagcttgagatcaccgccattcgtgcgcagggcgcgggcgggcagcatgttaataagaccagtacggctattcatctgcgttttgacattcgggcgtccagcctgccagagtattacaaagagcgtctgctcgccgccagccatcatttgatcagcagtgatggcgtgattgtcattaaggcacaggaataccgcagtcaggaactgaaccgcgaagcagctctggcccggctggtggctatgattaaagaattaacaacagaaaaaaaagcccgacgacccacgcggcccacccgtgcaagcaaagagcgcaggctggcaagcaaagcacaaaaaagtagcgtgaaggcgatgcgcggcaaagtgcgcagcggtcgggaataaaaagaaggaatggatggtgaaaaaagcgatagtgacagcgatggctgtaatcagcctctttactctgatgggatgtaataatcgggccgaagtcgatacgctttctccggcgcaggctgccgaactgaaaccgatgccgcaaagttggcgcggcgtgctgccgtgtgccgattgcgaaggaatcgaaacctctctgttcctcgaaaaagacggaacatgggtgatgaatgagcgttatctcggtgctcgtgaagaaccttcctccttcgcttcctacggtacatgggcgcgaaccgctgacaagctggtattaaccgacagcaaaggtgaaaagagttattatcgggcgaaaggcgatgcgctggagatgctcgatcgtgaaggcaatccgattgaaagccagttcaactatacgctggaagcggcacaatccagtttacctatgacgccgatgaccctgcggggcatgtatttttatatggctgatgcggcgaccttcactgattgcgcgaccggaaaacgtttcatggtagcgaataacgcagagctggagcgtagctacctggctgcgcgcggtcacagtgaaaaaccggtgttactgagtgtagaaggtcactttacgcttgagggtaatccggataccggtgcgccgactaaagtattggcacccgatacggcagggaaattttaccccaaccaggattgcagtagtttggggcagtaacccgtcttgagacagaaacaaacgcaaaacaggccagaaggatatatttcaacattttgaatttgcacgttttttgtaggccggataaggcgtttacgccgcatccggcaatggtgctcaacgcctgatgcgacgctggcgcgtcttatcatgcctacgacccccctcataccttaaggcggataaggcatttactttatcaccgggtcaaaccaacaaagcgacccgccttgatataaatcccaggcttcaggtgcccaacatactgtaactgcgtttctggcttaaacgcagagacatcaccaatacgcatatgcatcagatcggcagggctaatccagccgctttgcgccagtgtaagtggatgcccggctttggcaaaggcatccgtgacaaattcgctacaaaaccagctctttttgtctccttcgcccacactgcttaactgcgctttcgccaggccgctgacgcactgttggcgaaaatcctcggagaacggattcagactgcacatctggcgagtcaccataaagggaataaattcgacaatgccgcgatagttataaccgctatctttgattttattggcaaacgcggtgatatctgtggcttgttgcggggtaagatccgggactcgtaagacgaaaagcttatcactatgcttcatcgcttttttaagggaaacgatctggacgccagcgcctgtcgcttctgcaacgttattatcacccagaaagattgcaacgtgactcacagaggaagtgctgaagacgcggattccaaaactggttaccccaaggctactggagaacagcaaatcgccgggtttgagatcaggtgccgttatttcttttatactttgttcggtgaaagagctttgatgctggaatttgacagcccatgtttttgcctcggcatctactgctgtggcacttgggtctggctggctgatatcaacggtacaagcgctaagtaaaagaaagctggggagaaacaggcggcagtacgcctttggtttatccattttatacaatccatgtaaaaaaagggccctgaaattcaggaccctttctggcatcagcctttaatctgtttcaccagatattcgacgatgtcaccagtcttaattaactgtttctcgccgttgcgacgatatttatattcgatatcgtcgttgtcgaggttacggtcgcccagcacaatagtgtgcggaataccgatcagttccatatcagcaaacatcacgcccggacgctctttgcggtcatccagcagcacttcgataccttgtgcacgcagttcgctgtacagtttctcagcaagctcttgtacgcggaaggatttgtgcatgttcatcggcagaatcgccacctggaacggcgcgatagcgtcaggccatacgatgcctcgttcgtcgtagttctgctcaatcgccgcagctaccacacgcgttaccccgataccgtagcaacccatcgtcaggatttggttgcggccatcttcaccctgtacggaggctttcagtgcttcggagtacttggtacccagctggaagatgtgaccaacttcgataccacgtttgatcagcagcctaccctggccatccgggcttggatcgccagccaccacgttacggatatctgcaacttccggggtagcgacatcgcgatcccagttgatgccgaagtagtgtttaccatcgatgttagcaccagcagcgaaatcactcatcgccgcaacggtacggtcaatcaccaccggaatcggcatgtttaccggacccagactacccggaccggctttaaccacggcacgaatttcttcttcggtcgcgaaagtcagcgggcttgcaacctgcggcagtttttctgctttaacttcgttcagctcgtgatcaccgcgcaccagcagcgcaacctgcgggaagctgctgccttcaaccgctttaaccagcagagtcttaaccgttttctcaatcggcagattgaactgttcaaccagttccgcgatggttttcgcgttcggcgtatcaaccagcgtcatttcctgggtagcagcagcgcgcggttctttcggcgcgatagcttctgccagttcaatgttcgctgcatagtcagaggtgtcggagaagaccacatcgtcttcaccgctctgcgccagcacctggaattcgtgagaggcgctgccgccgatagaaccggtgtcggcttgtacggcgcggaaatccagccccatgcggctgaagattttgctgtaggccgcatacattgcatcgtaggtttcctgcagggattcctgagaagtatggaaagagtaagcatctttcatcaggaattcgcgggaacgcatgacgccgaaacgcggacgcacttcgtcgcggaacttggtctggatctgatagaagttcagcggcagctgtttgtaagagctaagctcgttacgaatcaggtcagtgataacttcttcatgagttgggccgagtacgaacggacgctcgccacggtcaacaaaacgcagcagttccggaccgtactgttcccaacgaccactctcttgccacaaatcggctggctgaaccaccggcatgctcacctcgatcgcaccggcgttgttcatctcttcacgcacgatgttttcgacttttttcagaacgcgcacgccggtcggcagccaggtatataacccggaggccagcttgcggatcatcccggcgcgcagcatcagctgatggctgatcacctcggcgtcggcaggtgtctccttgagagtggagagcaggtattggctagtacgcatgttgttacggttccagttggaaggtagaacaggctcaaggcgagcctgggacaaaaaaagtgatttagtttaccagtgcaaaagaaatgtcaaaagagaagggcgtgaatttaacgcggttccagcgcaaagacttcaaaacctgcgtcggtgacgcgccagcgaacgttaaaatcatgtagccagacggcataggttttgcccgtttcctcacctttacgataggccgggcgcgggtcctgcgccagtacttcgcggataaacagcgttaactgcggataacgcttctccagcgtcaaaagctgcttttcgacctctgcggtaaaactcaccgccatctctgcagctggcgcactttgcgcatagctggcactggcatcgggaaggctttcggcaaaggggagatacggtttgatatccactaccggcgtaccatcgaccagatccagactgccgagcttcagaatcacgctgtctttatggcaaacaacctctttcagctctaccaggctcatgccaattgggttagggcggaaagtagagcgtgttgcgaaaacccccattctggcgttaccgccgaggcgcggtggacgcacagtcggacgccagccgccttccatcgtttgatgaaagacgaaaaggatccataaatggctgaacgcttccaggccgcgaacggcgtcggcctggttgtagggagcaatgagatgcagttcgccgttggcgctttttaccagacctggctggcgcggaacggcgaacttttctttataggggctgcgaataacgcctatttgctcgaactggaaactgctcatttcgccgtaatgttaagcgcagaaccgatacatacagcctgacgatagcagcctggcgtaccgctggtgacttcgcagctatgcagtaatacagcattggctttcattttagaggcgttgatttgcatccgcttacgtgcggttggaatgctcggcggagagtcctgattagaggcctggcaagagtcgccactgacttcaccgagatcgcggaacggtttgccgactaattcttctgcattggtataaattcggaccggcgtggcgcgcggcgctttcggttttgcaggctccgctttcggctggggtgcagtgctttgaacgggttcgacaggggatctgcttaacatggaacagccgcttagcatgagtgctactaaacagatcggtaaagcacgcatagtatttcctcaatgtatgatcaaaacgtcaatattgaatcaggagcttgtaaaaatgacaagacgggcaagcgcccgtcctgaatgatattacaaattgtggaaacagcctaaaaattaccagcctttaacagctccgccgttaaacactttgtttgctgcttcgtaaacttcgtcagactgataagcctggacgaatttcttcacgttctcggcgtctttgttatcttcacgcgtcacgatcaggtttacgtacggggactctttatcttcaacaaagataccgtctttcgccggagtcaggccaatctggctggcataggtggtattgataactgccagagcgatttgcgcgtcgtccagagaacgcggcagttgcggtgcttccagttcaacaattttcagatttttggggttctcaacaacatcaagaacggtcggcagcaggccaacgccatctttcagtttgatcaagcccactttttgcagcagcagcagactacgaccaaggttagttgggtcgtttggcacggcaacctggctaccatcctgcagttcatccagacttttgattttcttggagtaaccagcaatcggataaacaaaagtgttgcctactgcgaccagtttgtagccacgatctttcagttgctgatcaaggtacggtttatgctggaaggcgttggcgtcgatatcgcctttgctcaatgcttcgtttggcagaacatagtcgttgaaggttaccagctcaacgtccaggccatatttgtctttcgcaactttctgcgcgacttctgcaacctgctgttcggcaccaacaatcacgccgactttaatgtggtttggatctttttcatcctgaccgcagcctaccagtgccagacttccgatcagggctcccactgccgcaaaggttttgaatttgaacgccataccttattccttcttcaattatttatgttgtgttgaacgttacttgcgagtgacagcccggacgatgcggtcgcctgcgaactgaattaaataaaccagaatgaccagcaataccagtaccgtattcatcaccgtcgcgttatagccgatgtagccatactgatagccaatctgacctaaaccaccggcaccgactgcaccacccatcgcggaataaccgaccagggtaatcagggtgatagttgccgcattcaccagacccggcagcgcttccggtaacagcaccttacggacgatctgcatcggcgtggcacccattgcgcgggaagcttcaattaacccggttgggatctccagcagagcgttctcgaccatacgggcaataaacggtgctgcaccaacggttaacggaacaatcgctgcctgcaaaccaatgcttgtaccgacaataacgcgggtaaacggaatcatccatacaagcaagataatgaacgggatggaacggaaaatgttcacaatcgcagaaacggtacgatacagcttcgcgttagcaataatttgccccggacgcgtgacataaagcagaacgccaaccggcagaccaatcacaaagccaaaaaaaccggatacgaaggtcattgccagcgtttcccatacgccacgaaccagcagccacatcatcggctcagacataacccagtacctctacttttacatggtgttcctgcagccaggcaatggcggcttgcgtatcttgttgtgtgccgtgcatttcagtcagcatgatgccgaacttaacgccaccggcgtaatccatctgcgcgctaataatgttgttgttgacgttgaaacgacgcgcggtttcagaaagcagtggggcatcgacgctttgaccggtaaactccagacgcagcatcggcacgcagtcagtaaatggctccgcttgcagacgttcctggtaatcttccgggatatccagatgcagggtgctctgaataaacttctgcgccagcggcgttttcggatggctgaacacttcacttaccgtgtcctgctcgatcagttctccattgctgatgaccgccacgcaatcacaaatgcgcttcacaacgtccatttcgtgggtgatcaacagaatcgtcaaccccagacggcggttgatgtctttcagcagttcgagaatagaacgtgtcgttgccgggtccagcgcgctggtggcttcatcacacagcaatactttgggattgctggctaacgcacgggcaattgccacacgttgtttctgcccaccggaaagattgctcgggtagctatcatgcttatcgccaagaccaaccaaactcagcaattccgtcacgcgacgtttgacctcgtctttcggtgtgttgtccagctccagcggcagagccacgttgccaaaaacagtacggctagagagcaggttaaaatgctggaaaatcataccaatctggcggcgagctttggtcaactcggattcactcagcgtggtcagttcctggccatcgaccagcacgctaccctcggttgggcgctccagcaggtttacacaacgtataagcgtactcttacccgcgccactggcaccgataacgccataaatttgtccagctggcacatgcaggctgacgttgttcaacgcctggatggtgcgggtgccctggtggaacactttggtgatattgctaagttttatcattgattatttattatcgtcattaagttagtcgtggcatctcgaatgcctgaaacgggcaacgccgtcaatgaaatggatgttaaggcatccagacgtctaaatcaatcaggtttatgcgaagagcactttcttgcaggtcgaaacatgcgatactagcgtcacatgccttattaaggagctataaaaggtggcgaagagcgtacccgcaatttttcttgaccgtgatggcaccattaatgtcgatcacggctatgtccatgagatcgacaactttgaatttatcgacggtgttattgacgccatgcgcgagctaaaaaaaatgggctttgcgctggtggtagtaaccaaccagtctggcattgctcgcggtaaatttaccgaagcacagtttgaaacgctgaccgagtggatggactggagcctggcggaccgagatgtcgatctggatggtatctattattgcccgcatcatccgcagggtagtgttgaagagtttcgccaggtctgcgattgccgcaaaccacatccggggatgcttttgagtgcacgcgattatttgcatattgatatggccgcttcttatatggtgggcgataaattagaagatatgcaggcagcggttgcggcgaacgtgggaacaaaagtgctggtgcgtacgggtaaacctattacgcctgaagcagaaaacgcggcggattgggtgttaaatagcctggcagacctgccgcaagcgataaaaaagcagcaaaaaccggcacaatgattaaaagatgagcggttgaaataaaaatgcatttttccgcttgtcttcctgagccgactccctataatgcgcctccatcgacacggcggatgtgaatcacttcacacaaacagccggttcggttgaagagaaaaatcctgaaattcagggttgactctgaaagaggaaagcgtaatatacgccacctcgcgacagtgagctgaaagccgcgtcgcaactgctctttaacaatttatcagacaatctgtgtgggcactcgaagatacggattcttaacgtcgcaagacgaaaaatgaataccaagtctcaagagtgaacacgtaattcattacaaagtttaattctttgagcatcaaacttttaaattgaagagtttgatcatggctcagattgaacgctggcggcaggcctaacacatgcaagtcgaacggtaacaggaagaagcttgcttctttgctgacgagtggcggacgggtgagtaatgtctgggaaactgcctgatggagggggataactactggaaacggtagctaataccgcataacgtcgcaagaccaaagagggggaccttcgggcctcttgccatcggatgtgcccagatgggattagctagtaggtggggtaacggctcacctaggcgacgatccctagctggtctgagaggatgaccagccacactggaactgagacacggtccagactcctacgggaggcagcagtggggaatattgcacaatgggcgcaagcctgatgcagccatgccgcgtgtatgaagaaggccttcgggttgtaaagtactttcagcggggaggaagggagtaaagttaatacctttgctcattgacgttacccgcagaagaagcaccggctaactccgtgccagcagccgcggtaatacggagggtgcaagcgttaatcggaattactgggcgtaaagcgcacgcaggcggtttgttaagtcagatgtgaaatccccgggctcaacctgggaactgcatctgatactggcaagcttgagtctcgtagaggggggtagaattccaggtgtagcggtgaaatgcgtagagatctggaggaataccggtggcgaaggcggccccctggacgaagactgacgctcaggtgcgaaagcgtggggagcaaacaggattagataccctggtagtccacgccgtaaacgatgtcgacttggaggttgtgcccttgaggcgtggcttccggagctaacgcgttaagtcgaccgcctggggagtacggccgcaaggttaaaactcaaatgaattgacgggggcccgcacaagcggtggagcatgtggtttaattcgatgcaacgcgaagaaccttacctggtcttgacatccacagaactttccagagatggattggtgccttcgggaactgtgagacaggtgctgcatggctgtcgtcagctcgtgttgtgaaatgttgggttaagtcccgcaacgagcgcaacccttatcttttgttgccagcggtccggccgggaactcaaaggagactgccagtgataaactggaggaaggtggggatgacgtcaagtcatcatggcccttacgaccagggctacacacgtgctacaatggcgcatacaaagagaagcgacctcgcgagagcaagcggacctcataaagtgcgtcgtagtccggattggagtctgcaactcgactccatgaagtcggaatcgctagtaatcgtggatcagaatgccacggtgaatacgttcccgggccttgtacacaccgcccgtcacaccatgggagtgggttgcaaaagaagtaggtagcttaaccttcgggagggcgcttaccactttgtgattcatgactggggtgaagtcgtaacaaggtaaccgtaggggaacctgcggttggatcacctccttaccttaaagaagcgtactttgcagtgctcacacagattgtctgatgaaaatgagcagtaaaacctctacaggcttgtagctcaggtggttagagcgcacccctgataagggtgaggtcggtggttcaagtccactcaggcctaccaaatttgcacggcaaatttgaagaggttttaactacatgttatggggctatagctcagctgggagagcgcctgctttgcacgcaggaggtctgcggttcgatcccgcatagctccaccatctctgtagtggttaaataaaaaatacttcagagtgtacctgcaaaggttcactgcgaagttttgctctttaaaaatctggatcaagctgaaaattgaaacactgaacaatgaaagttgttcgtgagtctctcaaattttcgcaacacgatgatggatcgcaagaaacatcttcgggttgtgaggttaagcgactaagcgtacacggtggatgccctggcagtcagaggcgatgaaggacgtgctaatctgcgataagcgtcggtaaggtgatatgaaccgttataaccggcgatttccgaatggggaaacccagtgtgtttcgacacactatcattaactgaatccataggttaatgaggcgaaccgggggaactgaaacatctaagtaccccgaggaaaagaaatcaaccgagattcccccagtagcggcgagcgaacggggaggagcccagagcctgaatcagtgtgtgtgttagtggaagcgtctggaaaggcgcgcgatacagggtgacagccccgtacacaaaaatgcacatgctgtgagctcgatgagtagggcgggacacgtggtatcctgtctgaatatggggggggaccatcctccaaggctaaatactcctgactgaccgatagtgaaccagtaccgtgagggaaaggcgaaaagaaccccggcgaggggagtgaaaaagaacctgaaaccgtgtacgtacaagcagtgggagcatgcttaggcgtgtgactgcgtaccttttgtataatgggtcagcgacttatattctgtagcaaggttaaccgaataggggagccgaagggaaaccgagtcttaactgggcgttaagttgcagggtatagacccgaaacccggtgatctagccatgggcaggttgaaggttgggtaacactaactggaggaccgaaccgactaatgttgaaaaattagcggatgacttgtggctgggggtgaaaggccaatcaaaccgggagatagctggttctccccgaaagctatttaggtagcgcctcgtgaactcatctccgggggtagagcactgtttcggcaagggggtcatcccgacttaccaacccgatgcaaactgcgaataccggagaatgttatcacgggagacacacggcgggtgctaacgtccgtcgtgaagagggaaacaacccagaccgccagctaaggtcccaaagtcatggttaagtgggaaacgatgtgggaaggcccagacagccaggatgttggcttagaagcagccatcatttaaagaaagcgtaatagctcactggtcgagtcggcctgcgcggaagatgtaacggggctaaaccatgcaccgaagctgcggcagcgacgcttatgcgttgttgggtaggggagcgttctgtaagcctgtgaaggtgtactgtgaggtatgctggaggtatcagaagtgcgaatgctgacataagtaacgataaagcgggtgaaaagcccgctcgccggaagaccaagggttcctgtccaacgttaatcggggcagggtgagtcgacccctaaggcgaggccgaaaggcgtagtcgatgggaaacaggttaatattcctgtacttggtgttactgcgaaggggggacggagaaggctatgttggccgggcgacggttgtcccggtttaagcgtgtaggctggttttccaggcaaatccggaaaatcaaggctgaggcgtgatgacgaggcactacggtgctgaagcaacaaatgccctgcttccaggaaaagcctctaagcatcaggtaacatcaaatcgtaccccaaaccgacacaggtggtcaggtagagaataccaaggcgcttgagagaactcgggtgaaggaactaggcaaaatggtgccgtaacttcgggagaaggcacgctgatatgtaggtgaagcgacttgctcgtggagctgaaatcagtcgaagataccagctggctgcaactgtttattaaaaacacagcactgtgcaaacacgaaagtggacgtatacggtgtgacgcctgcccggtgccggaaggttaattgatggggttagcgcaagcgaagctcttgatcgaagccccggtaaacggcggccgtaactataacggtcctaaggtagcgaaattccttgtcgggtaagttccgacctgcacgaatggcgtaatgatggccaggctgtctccacccgagactcagtgaaattgaactcgctgtgaagatgcagtgtacccgcggcaagacggaaagaccccgtgaacctttactatagcttgacactgaacattgagccttgatgtgtaggataggtgggaggctttgaagtgtggacgccagtctgcatggagccgaccttgaaataccaccctttaatgtttgatgttctaacgttgacccgtaatccgggttgcggacagtgtctggtgggtagtttgactggggcggtctcctcctaaagagtaacggaggagcacgaaggttggctaatcctggtcggacatcaggaggttagtgcaatggcataagccagcttgactgcgagcgtgacggcgcgagcaggtgcgaaagcaggtcatagtgatccggtggttctgaatggaagggccatcgctcaacggataaaaggtactccggggataacaggctgataccgcccaagagttcatatcgacggcggtgtttggcacctcgatgtcggctcatcacatcctggggctgaagtaggtcccaagggtatggctgttcgccatttaaagtggtacgcgagctgggtttagaacgtcgtgagacagttcggtccctatctgccgtgggcgctggagaactgaggggggctgctcctagtacgagaggaccggagtggacgcatcactggtgttcgggttgtcatgccaatggcactgcccggtagctaaatgcggaagagataagtgctgaaagcatctaagcacgaaacttgccccgagatgagttctccctgactccttgagagtcctgaaggaacgttgaagacgacgacgttgataggccgggtgtgtaagcgcagcgatgcgttgagctaaccggtactaatgaaccgtgaggcttaaccttacaacgccgaagctgttttggcggattgagagaagattttcagcctgatacagattaaatcagaacgcagaagcggtctgataaaacagaatttgcctggcggccgtagcgcggtggtcccacctgaccccatgccgaactcagaagtgaaacgccgtagcgccgatggtagtgtggggtctccccatgcgagagtagggaactgccaggcatcaaattaagcagtaagccggtcataaaaccggtggttgtaaaagaattcggtggagcggtagttcagtcggttagaatacctgcctgtcacgcagggggtcgcgggttcgagtcccgtccgttccgccacttattaagaagcctcgagttaacgctcgaggttttttttcgtctgtatatctattattgccagaatcgcaaaaatcctctgcattttacgctctttttcctcaacagtctgaagcccataatcacctcagttaacgaaaatagcattaaaagaggcatattatggctatccctgcatttggtttaggtactttccgtctgaaagacgacgttgttattagttctgtgataacggcgcttgaacttggttatcgcgcaattgataccgcacaaatctatgataacgaagccgcagtaggtcaggcgattgcagaaagtggcgtgccacgtcatgaactctacatcaccactaaaatctggattgaaaatctcagcaaagacaaattgatcccaagtctgaaagagagcctgcaaaaattgcgtaccgattatgttgatctgacgctaatccactggccgagtccagacgatgaagtctctgttgaagagtttatgcaggcgctgctggaagccaaaaaacaagggctgacgcgtgagatcggtatttccaacttcacgatcccgttgatggaaaaagcgattgctgctgttggtgctgaaaacatcgctactaaccagattgaactctctccttatctgcaaaaccgtaaagtggttgcctgggctaaacagcacggcatccatattacttcctatatgacgctggcgtatggtaaggccctgaaagatgaggttattgctcgtatcgcagctaaacacaatgcgactccggcacaagtgattctggcgtgggctatgggggaaggttacagtgtaattccttcttctactaaacgtaaaaacctggaaagtaatcttaaggcacaaaatttacagcttgatgccgaagataaaaaagcgatcgccgcactggattgcaacgaccgcctggttagcccggaaggtctggctcctgaatgggattaagcctctctgacagctcctccgggagctgtttttacatgctcgctaaggaaatcgataaaagcccggatgcgcgtacttaccgcacggtcgctgtaatagacggcactgaatggcatttccactggcaacactttatctgccattaactccaccaattctccgcgagcgatttctttgtcgatcatgtagtcggacaaacacgcaatcccgttgccactcaggcaaagctgtttcagtgtttccccactattggaactcaaaccgtacttcacctcatgtaattgtccatcgctacgggctatcggccaggtattgagggaagcgggttcagtgaatcccaggcaaatatgttgctttaaatcgtcgatcgtttctggcttcccgtagcgggaaatataatcgggggaggcgataatttttcgataactgttaaataacggcctggcacgtaagctggaatccgttaacgtaccagcgcgtatcgcgacatccacttttctttcgatcaaattaataatcgtttcggaggagactaggctcaaagtgacttccggatagcgttcacggaaaggcttaattaacggcatcagaaagtgcagcaccactggagttgcggcatcgatccgtaacagtccacgcggtgtattacgcgtctccataatttcactttctgccgctgccatctcctgcaaaatactctgtacgcgacgaaaataacgctcgccttcttccgtcaggctaagttgtcgcgtggtccgattaagcaggctaacgccaagtttcatctccagctttttcaccgcccggcttaccgcactgtttgcttgccctaattgttccgctgcccggctaaagctgccgctttcgacgacgctaacaaaaatggcgagttcttcgctcgtggctttcatttttgctcctgttgcaaaatagaagagatattttgaatttatttgtcattaaaccatcaggatgcgtgatatgtcatgcgatttaatgttctccataatgagcaaaattctgaccggtgtaagcacttgcttacataacaatatacaattgctcgttgaaagagtgagctaaaatccctataacagtagaaccctcccgagtgcggaagggttgacgtaatagaggtttcaaagtcaaaagtgcgaaaaaacacctatgccatgcgctatgttgccggacaacctgcggaaaggatcttaccgccggggtcttttgcgagcatcggccaggcattaccacctggggaaccgttaagtaccgaagagcgtattcggatcctggtgtggaacatatacaaacagcaacgcgctgaatggttgagcgtattaaagaactacggcaaagatgcacatctggtgttattgcaggaagcgcagacaacgccagagttagtacagtttgcgaccgctaactatcttgccgccgatcaggtacccgctttcgtgctgccacaacatccttctggcgtaatgacccttagcgcggcacatccagtgtattgctgcccgttacgtgaacgagaacccattttgcgtctggcgaagagcgcactggtgacggtctatccattacctgacacccgcctgttgatggtggttaatatacacgccgtcaacttcagtctgggcgtggatgtctatagtaagcagttacttcctattggcgatcagatagctcaccacagcggcccggtcattatggcgggagatttcaatgcctggagccgtagaaggatgaacgcgttatatcgctttgcgcgggaaatgagcctgcgccaggtgcgttttaccgatgatcagcgccgtcgggcgtttggtcgcccgctcgattttgttttctaccgtggtctgaacgtcagtgaagcttctgtactggttacgcgcgcttccgatcacaatccgctactcgttgaattcagtcccggcaagcctgataaataaggtatgagtggtctgccacagggcagaccaacgtttggcgctgcgcaaaacgtgagcgcggtggtggcgtatgacttatctgcccacatgctggatgtcgtggcacaagctgccgaagcccggcaactgaaaaatatcaccacccgccagggatatgccgaaagtctgccatttgccgataacgcatttgatattgttatcagccgttattctgcccatcactggcatgatgttggtgcagcactgcgagaagtgaataggatattgaaacctggcggtaggctgattgtgatggacgtaatgtctccgggtcacccagtgcgcgacatctggttacagacggtagaagcattacgcgatacctctcacgtacgaaactacgccagcggtgagtggttgacgttaatcaatgaagccaatctgatagttgataatttaattacagataagttaccgctggaattttctagttgggtcgcgagaatgcgtacgccagaagcgttagtagacgctattcgcatttaccaacagagcgcaagcacagaggtgagaacgtattttgccttgcagaatgatggctttttcaccagtgatatcatcatggtagatgcacataaagcggcataaataaaaaaggcaccgggggaatcggtgcctttttattatctggtttgtcaggaatctggcatgttgttgtttttcacaaacaacgtcagcttatcgcctggttgcagattcgcagtgtcgctgttccagcgcatcacatctttgatgttcacgccgtggcgtttagcaatgctactaaggctatcgcctttgcgcacacgatacgtaatgctatcgctgttgtttgccagtcgctgtgcgctactgcctgcaccaatcgtcaaactttggcctggcttcagcttagatccgcgcagtttgttccactgctgcaaatctttggtgcttacgccgagacgactagcgatactactaagcgtgtcgccagagcgtacggtgtaaacacggctgttaagcggcgtattgtcggcaaccagcgtgctctgtacagcagcaatttcgccactagccagagattcacgcagttgatctgcatgcttctttggcaccatcacgtactgcgggccacttgcgcccagcgtggagccttttacgccagcgttgaatgtcttcagcttgctgacggaaatccccgccatatctgctaccttcgccatttcaaccgggctgctcaggtgcacacgcgccagagcacggctttcatcggtcgttggcagacgtacgccataacgcttgctgtttttgagaatatcactcaatgccagcattttaggcacgtactgcttcgtttcctgcggcaacggtaagctccagaagtccgtggatttcccacgcgctttgttcgttttaattgccttcatgacccgaccttcgccgctgttataagccgctacggtcagaagccagtcgccgtcaaacattttgttcagacgctgcatcatattcagcgcggcagttgcactagcaacaacatcgcgacgcgcgtcataattgcgggtctgtttcaaaccataattgcgccccgtgctcggaatgatctgccagatgcctgcggcattggcgccagacgttgcgtgaggatcaaaagcgctctccactatgggtagtagtaccagttccataggcatgttacgttttttaacttgccctgctatccagtacatatacggctctgcccgtaaagttacatcgtggagatagctcttattgcgtaaatatttctgtttctgttcgcgaatccggtcattttccggaattcccatctttagctcgtcgccaatgaaagcccacaagtcaccatctggcgcgatagacgtcccatcgtccatccatcgtgcctgacttgtaaactttgctgcttccccttgaccagctgcagaaaggctctgtgcgtgctgttgaacgttgccggtactctggcaacccacgagcaggacagaggcgagtaatatcgcttttgccttcatgtgtgtgtcaatagttgcttaaaagacgaccgatcataacggcgaacggagccgatgacaagaaagttttatcagaacctatctttcttactccttaaccatgcaaaacgctcttcaggttgttgcaataatgtttcttcattaattacattaattaaatcaatatcttccgttcttaaaaaaacattaatttgccgctcatttttcagaattacgggtagtgttatttgattttttgcccgtaactccttaactttacgataataatcatttatggacaaatcgtgcggaagaatactcaaagcaaacttcatattacttaaggtatattcatgagcacaacataccaatgtatcgtcaggtaacgcacttaactttttaagactttgatacatttgacttgctgtcccttcaaacaaccgaccacacccaccagaaaacagtgtgtcgccgcaaaatagataaggtttactgaagtaacagatatgtcctaaagtgtgacccggcgtagcaattacactaaattcatgccccaaaacgaaggcagtttcgccatctttgactacctgtgttgttcccttatcttgtgtctcttgtggaccatacaccacaatttgtggaaacttttccaccagttcttttacgccgccaacgtgatcgtggtgatggtgggtgagaaatatggcctccggttgccagttattggcggcaatggcgtttaatactggctctgcgtctccgggatcgacaatcaggcagcgacctgcttcatcattcaaaacccagatgtaattgtcatcaaaggcgggaatactgttaagattcatagattacctctcagtgtgaaacggaaggttgtgatgaaaccggcaagagtccctcaaactgtcgtggctcctgattgctggggcgatttgccctggggaaagctttatcgcaaggcgctggagcgccagctcaacccgtggttcactaaaatgtatggttttcatctgcttaagattggcaatttaagcgcagaaatcaattgcgaagcgtgcgcggtttctcatcaagtgaatgtttctgcgcaaggaatgcccgtccaggtacaggcggacccacttcatcttccttttgccgataaatccgttgatgtttgtctactggcacatacattgccgtggtgcaccgatccgcatcgtttattgcgtgaagccgatcgggtattgattgatgatggctggctggtcattagtggcttcaatcccatcagttttatgggattacgcaaacttgtgccggtattgcgcaaaaccagcccctataacagccggatgtttactctgatgcggcagctggactggctctctttgttgaattttgaagtgctacacgccagccgtttccacgttctcccgtggaacaaacacggaggaaaactattgaatgcgcatattcctgcgcttggttgcttacaacttattgttgcccggaaacggactattcctttaacgctaaatccgatgaaacagagtaaaaacaagccacgaattcgccaggcggttggagccacccggcaatgtcgtaaaccacaggcttaaacttcaacttggtagcctgtatcttccagtgtgggattcatcgccgcggcacgagccagttcatcacagcgttcgttttccgggtgtccggcatggcctttaacccattcccatttgatttgatgctgccccaatgcagcatcaagacgttgccagagatcgacattttttactggttttttgtctgcggttttccagccacgttttttccagttatggatccactgggtgataccctggcggacatactggctgtcggtactcaaaatgacttcgcaatgttcttttaacgcctccagcgcgacaatagcggccatcaactccatacggttgttggtggtgcgggtgtagccagcgctaaaggttttctcgcgtccgcgatagcgtaaaatagcgccgtaacccccaggtcctggattgcccagacagctaccatcggtgaaaatttctacctgtttaagcatctctggtagacttcctgtaattgaatcgaactgtaaaacgacaagtctgacataaatgaccgctatgagcactgcaattacacgccagatcgttctcgataccgaaaccaccggtatgaaccagattggtgcgcactatgaaggccacaagatcattgagattggtgccgttgaagtggtgaaccgtcgcctgacgggcaataacttccatgtttatctcaaacccgatcggctggtggatccggaagcctttggcgtacatggtattgccgatgaatttttgctcgataagcccacgtttgccgaagtagccgatgagttcatggactatattcgcggcgcggagttggtgatccataacgcagcgttcgatatcggctttatggactacgagtttagcttgcttaagcgcgatattccgaagaccaatactttctgtaaggtcaccgatagccttgcggtggcgaggaaaatgtttcccggtaagcgcaacagcctcgatgcgttatgtgctcgctacgaaatagataacagtaaacgaacgctgcacggggcattactcgatgcccagatccttgcggaagtttatctggcgatgaccggtggtcaaacgagcatggcttttgcgatggaaggagagacacaacagcaacaaggtgaagcaacaattcagcgcattgtacgtcaggcaagtaagttacgcgttgtttttgcgacagatgaagagattgcagctcatgaagcccgtctcgatctggtgcagaagaaaggcggaagttgcctctggcgagcataaatacctgtgaaaggcgctaaaaatagcgacttgggcgatttttgcagcaaacgattcaaaagatgagaaaaaccgttgacgaaggtcgaggcaatccgtaatattcgcctcgttcccaacggaacacaacgcggagcggtagttcagtcggttagaatacctgcctgtcacgcagggggtcgcgggttcgagtcccgtccgttccgccactattcactcatgaaaatgagttcagagagccgcaagatttttaattttgcggtttttttgtatttgaattccaccatttctctgttcaatgattttactctggcgtaggtgcgtgattctcgcttgttgtctcattcattaaaattcaataatgatatcgaaccattcagcttaaatatatttctagagaataaatttatattgattaaatgaatgtatatttcaaattgattttgtttgttattatttaagtgaggtatataattagagtccgttatcaatgctaaatattctaatcattatgacaggcgagggagtgtccaattatgaatagtaaaaagctttgttgcatatgtgtgttattcagcctgcttgcaggatgtgcctctgaatcttctattgatgaaaagaagaaaaaagctcaagtcacacaaagtaatattaataaaaacactccccagcaactgacagacaaagatttattcggtaatgaaaccactctggccgtatccgaagaggatattcaagctgcgcttgatggagatgagttccgcgttccccttaattctcctgtaatacttgttcaatccggcaaccgcgcaccggaaaccattatgcaggaggagatgcgaaaatattatactgtttccacattctctggtatcccggacaggcaaaagcctctgacttgtaacaaaaacaaagataaaaatgagaacgaggatgttgccagtgctgagaatatgaactggatgcaggcactgcgttttgtggctgcaaaaggacatcagaaagcgattattgtttaccaggatatgttgcagacaggaaaatatgactctgcgctgaaaagtacagtatggtccgactataaaaatgacaaactcactgacgctatctccctgcgctacctggtacgtttcacgctggtggatgtggcaacaggtgagtgggctacctggagcccggtgaattatgaatataaagtgcttccaccattgcccgacaagaatgaagccagtacgactgatatgacagagcagcaaatcatgcaacttaagcaaaagacctataaagcgatggtaaaagatttggttaaccgctatcaataataaattatatctgccgccaggaatttctggcggcaataatacaaaattctttgcataagaaatttttcttgacaaagacagtgcaagaaaggacatggaatccggagttaaaaactgtttgttttagaatatttaattatttaactgctgaatcttccttgcgagaaatatatccattattacatttcatgccatttttaatatagattgctcctgggaaaattcccgtattattaccgcaggggtgataattagtattgacatatcctgtgacaaaaggagctattaaaggtgctattacgatagctattagtaaaaatataagagttagctgtattgttatgtctgtggcgaaattgactaccttcgtttttttgattaagaatgattttattatcgtaagtaaaattacatgaatatttaaaaaggaaaacgacatgaaaccgaagcacagaatcaacattctccaatcataaaatatttccgtggagcattttattattgaatatagaggtttaactccggtaaaaaacaaagaagcattgaatgcagggaaaaataatatggccataaaaaacatcgaaagaaactcttttaatttaacatgtaaacgcatggttaatcctcatatcacgggtggagtgttaagaacatacataaatggagtcatgttttcccttttccatttatcaagttcctgttgccgttttagtccatctctaattgcatattttaatttttcacttaaatggcattgagcatcgatttcatttaaaacaactgtacacactatccctgtcagtaaaattgctcctccgacaagaattactggaaagccaaagctaacacaggcaaaagaagccagacttccaatagcggttgcaacaccaccggctataactgctttggccacatccatactaaaatcgccaagaaaattaaccagatctcgctcactactcataataaattctatggttctgctgatttaaccgcagagaagttcgccacagcaatccgaaaccactggcacgtggagaataagctgcacaggcgtctggacgtggtaatgaatgaagacgactacaaaataagaagaggaaacgcagcagaattatttagtgggatacggcacattgctattaatattttgacgaatgagaaggtattcaaggcagggttaagacgtaagatgcgaaaagcagccatggacagaaactacctggcgagtgtccttgcggggagcgggcttagctaataataccccgactctccccgtccttaaacacaacccccactcaccacaacctaaactcatccgcatcctgccatgccggaaacttttctctatattcccgcaatgctgccatgctcagctccgcatcaatgcgcgttgcctgatgcgcgtcggcagtagcgataatctctccttgcggattaatcacccggctgtcaccgcgataatggcagccgttgccatcgctgccgacgcgattgcatcccgccacatacgcctgattctcaatcgcgcgggccgtcagcaatgcctgccagtgcagagagcgcggagcaggccagttggcgacgtacagggcgaggtcataatcgttgagattgcggctccacacaggaaaacgtaagtcgtagcacaccagcggcaaaatacgccagccgcgccattccacaatcactcgcgcattgcccgctttataatgtagatgctcatctgccatgcggaacagatgacgcttatcataaaaatgtaccgtgccgcccggctcaaccagcaaaaagcggttaacgctaccagactccgtttgtaatgcaacactgcctgcaatcagcgcattgcactgctgcgccttagctgtcatccagttcactacgtcatcttgtgctaggctgctagctgccgcttccatggcaaagccgctggtaaacatctccggtagaacgatcacatcgcgcccggtaataccttccagttgacgatcaaaatgacgcaggttggcaggaccatccatccacaccagtggttgctgcaaaagcgtaatcttcaaaccaggcacggtgtacaactcctttatgcgaagggttttataactttaacaccttatcaggcagttgccttagcgcagaataaattgataacaaatgctgatattggaaatatctgatttgcaaattatcgtgttatcgccaggctttaggaggttaataacatgggcaggataagcagcggaggaatgatgtttaaggcaataacgacagtcgccgctctggtcatcgccaccagtgcaatggcgcaggatgatttaaccattagcagccttgcaaagggcgaaaccaccaaagctgcatttaatcagatggtacaagggcataagctgcctgcctgggtgatgaaaggcggtacttatactcccgcacaaaccgtaacgttgggagatgagacgtatcaggtgatgagcgcgtgcaaaccgcatgactgtggcagccaacgtatcgctgtgatgtggtccgagaaatctaatcagatgacggggctgttcagcactattgatgagaaaacgagccaagagaaactcacctggctgaatgtgaacgatgcgcttagcattgatggtaaaacggtgttgttcgcggcgttgaccggcagcctggaaaaccatccggatggctttaattttaaataattagcggataaagaaacggagcctttcggctccgttattcatttacgcggcttcaactttccgcactttctccggcaactttaccggcttcgtcgccagctcttccggatcaaagtcatcaacgttaatactgcgcagacggctttcttcagctttcaccagaatagcggcttcatctttatcaatcagccccttcaccagcgcgttgtgcgccagttcatccagacgggtaaacggcaggtttttacccagctctttacagatccgctgatgaattgggtcggcggcaatcacatccaccagcgcctcttccagcaagccaaccggattatgctcgctcggcgtcaggtactgaccgcgaccaatgcgggaacgggtggcgttcggcacttgtaaaatcttcgccactttatgatccagcttgtcagaaggtgccagataatgacgtccggtcgggaagatcaccacattcagcagcccggcaaccacgcggttcgggaagttttgcagtaaatcatccatcgcctgttcagcctgatacagcgcatcttgtacgccccagtgcaccagcggcaggtcggcttcattacggccttcgtcgtcataacgcttcagcacggcagaggcgaggtagagctggcttaaaatatcccccagacgggcgctgatgcgctcgcgacgtttcaggctgccgcccagcactgccatgctgacatcagaaagcagggcgaggttggcgctcaggcggttcaggtgctgatagtagcgtttagtggcatcgccggttggcgtgctgctggttaaaccgcgcgtcaggcccagccagaagctgcgaactttgttgctaccgacgtgaccgatatgtttgaacaacagtttatcgaacgcgttgacgtcattgttcttcgccgcttccatctcttccagcacgtacggatggcaacgaatcgctccttgtccgaagatcatcatgctgcgggtcagaatgttagccccttcaacggtgatggcaatcggtgcgccctggtaagcacgcgccaggaagttgctttgcccgagcataatgcctttaccgccggtaatatccatcgcatcaataatgttctgctgcccgcggtgggtacagtgatacttaacgatagcgctcagcacggcaggtttttcgccgagcataatgccgtaggtaatcaggcttgccgcagcatccatcacgtaggcattaccggcaatacgcgccagcggctcttcaatcccttccatcttaccaatagagattttgaactgacggcgaatgtgagcatacgcgccggttgccagcgctacgcttttcacgccgccggtactgttggaaggcagggtgatgccgcggcctacgctgaggcactccaccagcatccgccagccttgcccggccattttcggcccgccgatgatgtaatcgatcggcacgaagacatctttaccgcgcgtcggtccgttctggaacggtacgttcagcgggaagtggcgacgaccaatttccacgcccggcgtggtggttgggatcagcgcacaggtaatgcctaaatcttctgcaccgccgagtaatttttccgggtcggagagtttaaacgccagcccaagcacggtcgcaatcggtgccagcgtaatgtagcgtttgttccaggtcagacgcatccccagcacctgctggccctgccattcgcccatgcagacaatcccggtgtccggaatcgcgcccgcatcggaacccgcttccgggctggtcagtgcaaagcaggggatctcctgaccacgcgccagacgcggcagatagtgatctttctgctcgtcagtgccgtaatgttgcaacagttcgcccgggcctaaactgtttggcacgccgacggtaatcgccaggatcccgctcacgccggagagtttttgcagcacgcgagactgggcataagcgctgaactccagcccgccgtactcttttttgatgatcatcgcgaagaaacgatgctctttaaggtacgcccacaactccggcggcagatccgccagctcatgggtgatctggaaatcattcgccatccggcaggcttcttctaccgggccgtcgagaaacgcttgctcttcggcggtcaggcgcggctgcggatagttatgcagctttttccagtccggcttgccctggaacaagtcgccctcccaccaggtggtgcccgcatcaatcgcttctttctcagtgcggctcatcggcggcatcaccttacggaaaccgcgaaataccggcgcggaaatcatgctcttacgcataggcgcaaagttaaatggcacgaggataatggccagaggcaccagtacccacgcgctccacagaccagcaacgccgagggcggctgtccaggcgagcaaaatcagactgctgataaataagctcacgcggtgatagaacaacgcgccgagcaggacaaccgtagcgagaatactcaaaatcatcataacgaaaagccccttacttgtaggaggtctgaccacttgtgatgatatggttgtagtggatgtaaaaacatttagcaatatgtttacaatataattacaacaaagctcacattgttgctgtttttatccgcacttcaggtcaaaaagtcctggtcatagcacctgcccgtacttctcgcttttggcggtatccggtacactgcattttgtctattacatttatgctgaaggatatcctcatgtaccaggatcttattcgtaacgaactgaacgaagcggcggaaacgctggctaactttttaaaagatgacgccaatattcacgccattcagcgcgcggcggtcctgttagcagacagctttaaagccggtggcaaagtgctttcctgcggcaacggcggttcccattgcgacgctatgcactttgccgaagagttgaccggtcgctaccgtgaaaaccgtccgggctacccggcgattgctatttctgacgttagtcatatttcctgcgtcggtaatgatttcggtttcaatgatattttctcccgctacgttgaagcggtaggtcgcgaaggcgatgtactgctggggatctccacctccggtaactctgcaaacgtgatcaaagcgatcgcagcggcgcgtgagaagggaatgaaagtgatcaccctgaccggtaaagacggcggcaaaatggctggcacggcggatatcgaaattcgcgtaccgcactttggttatgccgaccgcattcaggagattcacattaaagtgatccatatcctgatccagttgattgaaaaagagatggttaagtaagtctggcgtaggccggataagacgtttacgccgcatccggcatttgtgcgctgatgcctgatgcgacgctgacgcgtcttatcatgcctacaaatctgtacgcgaaccgtaggccgaataatgcgttcacgccgcatccgacctgaaaattcttaaatcaatcttcgccgggggccatgcgctcccgctgttgtggaggttacccatgtgcgaattgctcgggatgagcgccaacgtccctaccgatatctgctttagtttcaccgggcttgtacagcgtggtggtggaaccgggccacataaagatggctggggcattaccttttacgaaggtaaaggctgtcgcacatttaaagatccacaacccagctttaattcccccatcgccaaacttgtccaggactacccgataaaatcctgtagcgtggtggctcatattcgccaggctaatcggggcgaggtggcgctggaaaatactcacccatttacccgcgagttatgggggcgtaactggacttatgcccataacggacaactgacgggctacaaaagtctggaaaccggcaacttccgcccggtaggcgaaaccgacagcgaaaaagccttctgctggctcctgcataaattaacgcagcgttacccgcgcacaccgggcaacatggcggcggtatttaaatatatcgccagtctggcggatgaactgcggcagaagggcgttttcaacatgctgcttagcgacgggcgctatgtaatggcgtattgcagcactaatttacactggatcacccgccgcgcgccgtttggcgtggcaacgttgctggatcaggatgtggaaatcgacttcagcagccagaccacaccgaatgatgtggtcacggtgattgcaacacagccgctgacgggcaatgaaacctggcaaaagattatgccaggcgaatggcgcttattttgcctcggggagcgtgtagtttgattattttgcctcggggagcgtgtagttacttgccagttgtggctgcacaacttcgtggcttaacggcttgctgaccacgtaacgaccattgaccacagaaacggttggtggcttacgggtttgctcaaagtagtcgtaacccggcttcagttgctcccagaagtccttaaagttggaatatttatggcgcttcatattggcgtcggtcatgcggaacgggtaaatactcacttgcacgctcggctgaccaaacaccagcgcaccagtaacgaactggaatatctcatcaataccctgattggtcattgcgtagcagccgatggaaacacaatcgccgtggatcatcaggtatttcccttcataaccatgcgcacggtcataggcattggggaaaccaatattaatcgctttgtagtaacggctgtctggttttaactgattacgctggacgctataaaacccttccgggcttttgaaatcgccctgacgctgttttggccctaagccgccggaatatttacagattttatagctgtcgagcagttgatattgctcgcccattttgacgtagagatcgagcgtacgttcttccttgaagatctggatgtagacaggggatcccatcaactgctgcttatactctttgctcacaggcgtggtagagctactgctgcccagcaaaccggcaaaactaacgcacgggatcaacaacatcgcaagaattaatgcgattttacgcatactgcttattccttgataaaacggttacacacgccaggacggcaaaatggatcccaaatcggaatagtctggatttggaaggctcacattatcaccaaaagagttttacgcaagcctgtcggcgcagggtttacaaatttcatcggaagcgggctttacccaaagagcgccgcgtgagttccagttctctcaaatcgtaaaagtttatcggtaagtttgtaaatcaggatccagtccggttcgacatgagcatcgcgataacctttccaactaccttgcagcgggtggtctttataaacagctggaagcggtaaagtattattgataagaagcgtcataagatatttcaatttattcatatccttatgacgcttttgtgcaagttttacatccttactatattgtccgctgtattcaatatccctttgaatcatatttaaattcctaatttatcaaataaatcatcggcgtctttggccttatgaacatcaatgccagcttcgctgtttttgatactttgaatggttaattgattaggctcgcgtaaatcaaacggcaatgccttttcacgcgcgacctttgtgagggttatgcgaaccaggtcagagatggtcagccccatcccggccagtacgtccgctgcctgattcttcagatcttcatcgattcgggcgcgaacaaacgcgttagcagccattggggtatctcctgtgctgtatatttattcagcttgaattgtagctcaaatgagcaacagcgacaatccatgagtaatttaataaacggatgtttttacataattaactgaaatatatatgttaattttataataatggtttattaagtttgttcagaaacgatccgggatacactgcaacattaaagcatgaccagccattattgagtatgtccttgccgagcattccatcctttgtattgagcggattactgttgatttgtttgccgttttctagttttgccagcgccaccacaagtcatatctctttcagctacgccgcccgccagcggatgcaaaaccgtgcgcgtttattaaaacagtaccaaactcatctgaaaaagcaggccagctatattgtggaaggcaatgccgaaagcaaaagggcgctacgccagcacaaccgggagcagataaaacagcatccagaatggtttcctgctccgctcaaggcgagtgacagacgctggcaggcgctggcggaaaacaaccactttttaagcagcgaccatctgcataacattaccgaagtggcgattcaccgcctggagcagcagcttggcaagccttacgtctggggcggtacgcggcctgataaaggctttgactgtagcgggttggttttttatgcctacaacaagatccttgaggctaagctcccgcgcacggccaatgagatgtaccactatcgccgggcaacgattgtggcgaacaacgacctgcgccggggagatttgctgtttttccatatccacagccgcgagatagccgatcatatgggcgtgtatttgggcgatgggcaatttatcgagagcccacgtaccggcgaaaccattcggataagccgattagccgaacctttctggcaggaccattttttgggcgcgcgcaggattttgacggaagagacgattttgtaagacggataaggcgtttacgccgcatccggcagttgtacgcaggtgcctgatgcgacgctggcgcgtcttatcatgcctacgagcccgcgaatatttgcgagccgctttcccgatataaaacaacctcattgccaacctttccttttcttcttaccgttgagaaaaaggagtcgccatgtctgaatatcgtcgttattacatcaaggggggaacatggtttttcacggtgaatttacgaaatcgtcgaagccaacttttgaccacccagtaccagatgctccgtcacgccattattaaagttaagcgagacaggccttttgaaatcaacgcctgggtcgttttgccagagcatatgcactgtatctggacattacctgaaggcgatgatgatttttccagccgctggcgggaaattaaaaagcaatttacccatgcttgtggattgaaaaatatctggcaaccacgtttttgggagcacgccatccgcaataccaaagattataggcatcatgttgattatatttatataaatccagtaaagcatggttgggtaaagcaagtgagtgattggccattcagtacgttccatcgcgatgtcgcgcgagggttatatcccatcgattgggcgggggacgtaacggattttagtgccggggagcgtatcattagttaattgtgcgcagatgcctgatgcgacgctagcgcgtcttatcatgcctacaaacttgtgccggatcggtaggccggataaggcgtttatgccgcatccggcagttatgcgcagatgcctgatgcgacgctggcgcgtcttatcatgcctacaaacttgtgcctgaacggtaggacggataaggcgttcacgccgcatccggcagttgtgcaccaatgctggatacttacatcaacgcccccataatcttcaactccagctcatccggcacttcgttatacgacagcacatgcagccccggcgcaaacaaccttgcataacgcgccagcaaagggcgcagctgcggtggcaccagcagcaccgggtctttccccgccgctttcatctgctctttcacctgtggcatcgtactctggaactggttgagcatattcggatcgaccggcacgctgtcgagcatcactttcccgccctgttgcgcctgattcaccacgttggtcagcagattttccagctcattattcagcgtatacaccgtcagctcctgcttgcgaacgaacggatgggtaatgctgcgccgcaatgccaggcgcacatcggccgccagcagaatatgatctttcgtcaccgtgctactggcgaccagcacggtggcgatggtgacgatatcgcgcagggaaacgccttcggtcagcagcgcccggtacactttcagcaactggctgtaattgagcgccgcgctcaaatcttccgccagacgcggtgccgtcgacgataaacggttatgcaactgcgtaatatcatcatagttaaacaaatcaggaatatagctgcgcacaatcttatttacatgggtagcgatcacgctggcgctgtcgatcacctgataccccatattcagcgccttcgctttctgcgccgcctggatccaggtgaccggcatcccgtacgccgggtcgttcccctgcacgccgtcaatctcgccgtaggtttcgctggagggcagggccatcagtttatccgccggaatatccgcttcatcagcctttatgccgttgatgaaaatggcgtactgactgggcttaaggcggaagttttcccgaatgcggatctccggcagcagcacgccgttgccgtcagaaatcacctgccgcacgccgcgaatccgctgggtgagcgggttaccctgtgctttgtccaccagcgccaccagtttgtaaccgaggcttaaactgataggctcgatcagcggaatggtttcccaactgacctgctgctcgctggtttcggtgatggtgcgggtcagcgtttcgaggcttttctcttccgcctccgccgccagcggctgtttgctcatccgccagccggtaaaaccaagcagggcgctgaacagcaaaaacggcaggtgcggcattcccggtaccaccgccagcacgaacataatcccggtggcggtgtagagcaccgacgggcttgccagcagctggttacgcacgtcatgggcgatatcgccgttgtcgctgacgcgggtgacgataatcgccgccgcggtggagagcagcagggaagggatctgcgccaccaggccgtcgccgatggtcatcagcacatactgctggaaggcagcatcggcgctcaggttgtatttgaagatcccgatacagacgccgccgatcaggttgatcgccagaatcatcatcccggcgatggcgtccccgcgcacaaacttcgatgccccgtccatcgcgccgtagaaatcggcctcgctggcaacatctttacgccgggtttgcgcctgcgcctggttgatcaatccggcgttaagatcggcgtcaatcgccatctgtttgccgggcatcgcgtctaaggtaaagcgggcagaaacctcggaaatacgctcggcccctttggtgacgacaataaagttgattgtcaacagcgtcagtaaatccgagcgtgaaagcattatcgccgcgctgcacgggcagtcgatttttaacggtggtgggctgtcgccgttaaataaaatcagcccgtctcatccgccaaaacctgccaccgtggcggtgccggaagagacggagaaaaaagcgcgtgatgtgaatgagaaaacggcgctgctgaagaagaaatccgccaccgagcttggtgagctggcaaccagtatcaacaccattgcccgtgatgcgcatatggaagcgaatctggagatggagattgttccccagggattacgcgtgctgattaaagacgaccagaaccgcgatatgtttgaacgcggcagcgcgaagattatgccgttctttaaaacgctgctggtggagctcgcgccagtgttcgactcgctcgataataaaattattattaccgggcataccgatgcgatggcctacaaaaacaatatctacaacaactggaacctttcgggtgaccgcgcgctttcggctcgtcgggtgctggaagaggccggaatgccggaagataaagtgatgcaggtaagcgcaatggcggaccagatgctgctggattccaaaaatccgcaaagcgcgggcaaccggcgcattgagattatggtgctgaccaaaagtgcgtccgatacgctgtatcaatactttggtcagcatggggataaagtggtgcagccgctggtgcaaaagctggataagcagcaggtgctttcgcagcgaacgcgttaaatgctgaatctttacgcatttctcaaaccctgaaatcactgtatactttaccagtgttgagaggtgagcaatgcgtaaaatcattcatgtggatatggactgctttttcgccgcagtggagatgcgcgacaatcccgccctgcgcgatatccctattgctattggcggcagccgcgaacgtcggggggtgatcagcaccgccaattatcccgcgcgtaaatttggcgtacgtagcgctatgccgacagggatggcgctcaaattatgcccacatctcaccttgcttccggggcgctttgacgcctacaaagaagccagtaatcatatccgtgaaatcttcagccgctacaccagccgcattgaaccgttgagtctggatgaggcttatctcgatgtcaccgatagcgtccattgccacggttctgcgaccctcatcgcccaggaaatccgccagacaatcttcaacgagctgcaactgacggcgtctgcgggcgtggcaccagtaaagtttctcgccaaaatcgcctccgacatgaataaacccaacggccagtttgtgattacgccggcagaagttccggcatttttacaaaccttaccgctggcaaaaatccccggcgtcggcaaagtcagtgcggcaaaactggaagcgatggggctgcggacctgcggtgatgtacaaaagtgtgatctggtgatgctgcttaaacgctttggcaaatttggccgcattttgtgggagcgtagtcaggggattgacgaacgcgatgttaacagcgaacggttgcgaaaatccgtcggcgtggaacgcacgatggcggaagatattcatcactggtctgaatgtgaagcgattatcgagcggctgtatccggaacttgaacgccgtctggcaaaggtaaaacctgatttactgattgctcgccagggggtgaaattaaagttcgacgattttcagcaaaccacccaggagcacgtctggccgcggctgaataaagctgatctaatcgccaccgcgcgtaaaacctgggatgaacgccgcggcgggcgcggtgtgcgtctggtggggctgcatgtgacgttgcttgacccgcaaatggaaagacaactggtgctgggattatgatgtatactattatgtatattctggtgtgcattattatgagggtatcactgtatgcatcgaattctcgctgaaaaaagcgtcaatatcactgagttacgtaaaaacccagctaaatactttattgatcaaccggttgcggttctttctaataatcgccccgcaggatatctcttaagtgccagcgcattcgaagcgttaatggacatgcttgctgaacaagaggagaaaaagcccataaaggcgcgcttccgtccaagtgctgcaagattagaggaaattacacgccgcgctgaacaatatcttaatgatatgacggatgatgatttcaatgactttaaggaataaggatgcgggtattcaaaacaaaacttattcgcctgcaacttacagcagaggaacttgatgcgttaacggcggattttatttcctataagcgtgacggtgttttgccagatatatttggtcgcgatgcactctacgacgactcctttacctggccattaatcaaatttgagcgagttgctcatattcatctggcaaatgagaataatccatttccgccacagttgcgccaattcagcagaacgaatgacgaagcgcatttggtatattgtcagggggcgtttgatgagcaagcatggttgctcattgccattctgaaacctgaacctcataaactggctcgagataacaaccaaatgcataaaattgggaaaatggcagaagcgtttcgcatgcgtttttgaatttatattatgaataacatacaaataagaaactatcagcctggcgattttcagcaactatgcgctattttcattagagcggttacgatgaccgccagtcagcattatagtccacaacaaatttccgcctgggcgcagattgacgaatctcgctggaaggagaaactcgcgaaaagtcaagtgtgggttgcgatcattaatgcacaaccggttggttttatttcccgcattgaacattatatcgatatgttatttgttgaccctgaatacacccgccgtggggttgccagcgctttgttaaaacctttgattaagtctgaatccgaacttacggtggacgcaagcataaccgcaaaacccttttttgaacgttatggttttcagacagttaagcagcagcgcgttgaatgccggggagcgtggtttactaatttttatatgcgatataaaccgcaacattaaatccagcttgcaatgaaaataacgcccgcctggtatgtgcgcgttttctgattccacaaactgcaaggaggtaaatcatgacaaatcctttatcaatgactctttgcagacctttccaggattaattctttttttcttgccctggattcgtctgccatttcctgatttttatatttatatactctaaataattcgagttgcaggaaggcgacaagcgagtgaatcgccaggagcttacataagtaagtgactggggtgaacgaacgcagtcgcagtacatgcaacttgaagtatgacgagtataaatggaatggtacatgggcaaatatattcgtcccttatccgatgcggtatttaccatcgcatctgatgacctgtggatcgagagtttagcgatccaacaattacacaccacggcaaatttacccaacatgcagcgcgtagtggggatgccagatttacaccccggacgcggctacccgattggcgcagcgttcttctctgttggtcgtttttacccggcaagacgtcgcggtaacggtgctggaaacagaaacgggccgctactctgacacactgcgtagcgcgctggtttctctcgatggcgataacgcatgggcattaagcgaaagctggtgtggcactattcagtggatttgtccgagtccgtatcggcctcatcatgggcgcaaaaactggtttctgggcattgggcgttttaccgctgatgagcaggaacaaagcgatgcaatccgttatgagacgctgcgtagcagcgggccgggcggtcaacatgtcaataaaaccgacagcgcggtacgcgccacgcatttggcatccggtattagcgtgaaggttcagagtgagcgtagtcagcatgctaacaagcggctggcacgattgctgattgcctggaagctggagcaacagcaacaggaaaatagcgcggcgctgaaaagccagcggcgaatgttccatcaccagattgaacgtggcaacccgcgacggacatttacagggatggcttttatcgaaggataatgaaggatgaaactgccggaaggcgattaaacgccatccggcagcaaatcaaataattacttcgccggaatttctttcagcagttcagtcagcagtgtccagtaatgacctacgctttcgatgtgaacttgctcatccggagagtgtggaccggtgatagttggcccgatagaaaccatgtccatttccggatacggttttttgaacagaccacattccaggcccgcgtggataatctggatgttcggcgtcttgttgaacaggcgctgataggtttcacgtaccagatgcatcaccggagaattagcgtccggctgccagccaggatatgcgcctttcgcttcggttttcgcgccagccagtttacccaggctatccagcatgctcaccacgtagtctttaccgctgtcgatcagactacggatcaggcagtgaatttctacgttattgtcagtcatggtcaccacaccgacgttcagggaggtttcaaccacacctttggctacatcggagttacgaatcacaccgttcggggtggcgttcagcagacgaataaaggtatcgcgagatttcgcaatcagggcagctttatcgttcgctacagagtccagcaacaaggccagatttttctctttttctgccagctcgtttttcaggatctcctgataggtattcaccagagatttcaggacgtcgactttatcagctgcgacagcaatggtcgcaaaggcttcacgcgggatggcgttacgcagtgtgccgccgttgaaatcgataaggcgcagatccagttcttccgcatgacccgccaggaagcgcaccagcagtttgttggcattacccagcccaacgtggatttccccgccggagtgaccgcctttcagaccttttaaggttaacttgaaggtttcaaaaccagctggaaccgcttcacgatctaaatgcaggttggaggtgaagtcgataccccccgcacaacccatgtagatttcaccttcttcttcggagtcggtgttaatcagaatatcagcctgcaaccagttgccctgtaagccgaacgcaccgtccataccggcttcttcggtcatggtcagcagcacttccagcgggccgtgaaccacgttttcgtcagccagaaccgccagcgcagaggccataccaatgccgttatccgcacccagcgtggtgccgcgcgctttaacccattcgccatcaatataaggctggataggatctttcgtgaagtcatgcacggtgtcgttatttttctgcggcaccatatcgaggtgggcctgtaagacgaccggtttacgattttccatacctgcggtagcaggtttacgaatcaggatattacctacctgatcgcgttcgacatggaaacctttctcttttgcccaaccaacaatgtattcagcgagttgctcttcatgataggacgggtgaggaatagaacagattttggcaaaaatatcccacagcggctgtggagataattgagacagttcagacacgttaagtctccttgtcgatcacccgcaaaacagtattgcaggtcacagggttagcagaaaatgttgtcaacacaagacaggcttgcgagatatgtttgagaataccactttatcccgcgtcagggagaggcagtgcgtaaaaagacgcggactcatgtgaaatactggtttttagtgcgccagatctctataatctcgcgcaacctattttcccctcgaacactttttaagccgtagataaacaggctgggacacttcacatgagcgaaaaatacatcgtcacctgggacatgttgcagatccatgcacgtaaactcgcaagccgactgatgccttctgaacaatggaaaggcattattgccgtaagccgtggcggtctggtaccgggtgcgttactggcgcgtgaactgggtattcgtcatgtcgataccgtttgtatttccagctacgatcacgacaaccagcgcgagcttaaagtgctgaaacgcgcagaaggcgatggcgaaggcttcatcgttattgatgacctggtggataccggtggtactgcggttgcgattcgtgaaatgtatccaaaagcgcactttgtcaccatcttcgcaaaaccggctggtcgtccgctggttgatgactatgttgttgatatcccgcaagatacctggattgaacagccgtgggatatgggcgtcgtattcgtcccgccaatctccggtcgctaatcttttcaacgcctggcactgccgggcgttgttctttttaacttcaggcgggttacaatagtttccagtaagtattctggaggctgcatccatgacacaggcaaacctgagcgaaaccctgttcaaaccccgctttaaacatcctgaaaccagcacgctagtccgccgctttaatcacggcgcacaaccgcctgtgcagagcgcccttgatggtaaaaccatccctcactggtatcgcatgattaaccgtctgatgtggatctggcgcggcattgacccacgcgaaatcctcgacgtccaggcacgtattgtgatgagcgatgccgaacgtaccgacgatgatttatacgatacggtgattggctaccgtggcggcaactggatttatgagtgggccacccaggcgatggtgtggcaacaaaaagcctgtgcggaagacgatccgcaactcagtggtcgtcactggctgcatgcggctacgttgtacaacattgccgcctatcctcatctgaaaggagatgacctggccgagcaagcgcaggctttgagtaaccgcgcctatgaagaggccgctcagcgtctaccgggcacgatgcggcagatggagtttaccgtacccggcggtgcgcccatcaccggctttttgcatatgccgaaaggcgatggcccgttcccgacggtattaatgtgtggtggtctggatgcgatgcagacggactattacagcctgtatgaacgttattttgcgccgcgcggcattgcgatgctgactattgatatgccgagcgtgggcttttctagtaaatggaagctcacccaggactccagcctgttgcatcagcacgtcttaaaggcgctgcctaacgtaccgtgggtggatcacactcgcgtcgcggcctttggtttccgtttcggcgctaacgttgccgtgcgtctggcataccttgaaagcccgcgtctgaaagcggttgcctgtcttggtccggtagttcataccctgttgagtgattttaagtgccagcaacaggtgccggaaatgtatcttgacgttctggccagtcgtttggggatgcatgatgcttccgatgaagcgttgcgcgtggagctgaatcgctatagtttaaaagtgcaaggattgctgggacgtcgctgcccaacgccaatgttaagtggctactggaagaacgatccgttcagcccggaagaggacagtcgcttaatcaccagtagttctgctgacggtaaattattagagatcccatttaacccggtgtatcggaattttgacaaaggtcttcaggaaatcaccgactggatcgaaaaacgcttgtgttaaaaatttgctaaattttgccaatctggtaaaacagttgcatcacaacaggagatagcaatgacgttaccgagtggacacccgaagagcagattgatcaaaaaatttaccgcactaggcccgtatattcgtgaaggtaagtgcaaagataatcgattctttttcgattgtctggctgtatgcgtcaacgtgaaaccggcaccggaagtgcgtgaattctggggctggtggatggagctggaagcgcaggaatcccgttttacctacagttaccagtttggtctgttcgataaagcaggcgactggaagagtgttccggtaaaagacactgaagtggttgaacgactggagcacaccctgcgtgagtttcacgagaagctgcgtgaactgctgacgacgctgaatctgaagctggaaccggcggatgattttcgtgacgagccggtgaagttaacggcgtgagtgaaatgtgccggatgcatcacatccggcaatattcattaaaactgatacgtcatgccaaccgcgacaatatcatcattattaatattcaatttgttatcgctatccagttggttgattttataatcaacaaacgcactcatatttttgttgaaataatacgtagcaccgacgtcgatataattgaccagatcttcatcaccgataccttcaatatctttccctttgcttaagacataacccaggcttggacgcagaccaaagtcaaactggtattgagcgaccgcttcaaagttctgtgtcttattggcaaagccgccagttattggcgtcattttgcgtgtttcagaatagaaagttgccagataaatattattggcatcgtatttcagacctgttgcccatgcttctgcacgcttgcctgtgccacggctttgcaggttctgctcgttggtgcgatcactgttggtataggccccactaatggcgaaatcgctgccgccaaagtcatatgtcaaactcgtgccgaagccatcgccgttttgctttttaacgtcgcggttttcgtttttcccttgatattgcagggttaagttcaggccatcgataacgccgaagaagtcggtgttccgatacgtcgccagaccgctggcgcgtttggtcataaagttgtcggtctgcgcgctggaatcgccaccaaattccgggaacatatcggtccaggcttccacgtcatacaacgcccccaggttacgaccataatcgaaagaacccaaatctttatatttcaacccggcaaaagcgagacgcgttttttgctgtgcagtatcactctctgctttattaccggcaaactctgcttcccaacgaccataaccagtcagttgatcgttaatttgtgtttcgcctttgaaaccaaaacggatataactctggtcgccatctttactggcgttatcactcatataatgcatggctttaactttgccatagacatccagtttattaccgtctttattatatatttctgcagcctgtacagatgcagatgccacaatgcccatcaccactaatgccagagtgctctttttcattttcattcctgattttaattaacgcgcgaatattcagcgggagagtcccgttgaaaacaggaaagtttttaacctgagattgttaaagatatattacagattaataatattcttaaaatgtggtaatttattaaatctgtaataaaagcgtaaacaactgccgctaggcttgctgatcccgcgcaacaaaacgccatgctttgctcgcagatggttggcaaccgacgacagtcctgctaaaacgttcgtttgatatcatttttcctaaaattgaatggcagagaatcatgagtgacagccagacgctggtggtaaaactcggcaccagtgtgctaacaggcggaagccgccgtctgaaccgtgcccatatcgttgaacttgttcgccagtgcgcgcagttacatgccgccgggcatcggattgttattgtgacgagcggcgcgatcgccgccggacgtgagcacctgggttacccggaactgccagcgaccatcgccagcaaacaactgctggcggcggtagggcagagtcgactgattcaactgtgggaacagctgtttagcatttatggcattcacgtcgggcaaatgctgctgacccgtgctgatatggaagaccgtgaacgcttcctgaacgcccgcgacaccctgcgagcgttgctcgataacaatatcgttccggtaatcaatgagaacgatgctgtcgctacggcagagattaaggtcggcgataacgataacctttctgcgctggcggcgattcttgcgggtgccgataaactgttgctgctgaccgatcaaaaaggtttgtataccgctgacccgcgcagcaatccgcaggcagaactgattaaagatgtttacggcattgatgacgcactgcgcgcgattgccggtgacagcgttagtggcctcggaactggcggcatgagtaccaaattgcaggccgctgacgtggcttgccgtgcgggtatcgacaccattattgccgcgggcagcaagccgggcgttattggtgatgtgatggaaggcatttccgtcggtacgctgttccatgcccaggcgactccgcttgaaaaccgtaaacgctggattttcggtgcgccgccggcgggtgaaatcacggtagatgaaggggcaactgccgccattctggaacgcggcagctccctgttgccgaaaggcattaaaagcgtgactggcaatttcagccgtggtgaagtcatccgcatttgcaacctcgaaggccgcgatatcgcccacggcgtcagtcgttacaacagcgatgcattacgccgtattgccggacaccacagccaagaaattgatgcaatactgggatatgaatacggcccggttgccgttcaccgtgatgacatgattacccgttaaggagcaggctgatgctggaacaaatgggcattgccgcgaagcaagccagctataaattagcgcaactctccagccgcgaaaaaaatcgcgtgctggaaaaaatcgccgatgaactggaagcacaaagcgaaatcatcctcaacgctaacgcccaggatgttgctgacgcgcgagccaatggccttagcgaagcgatgcttgaccgtctggcactgacgcccgcacggctgaaaggcattgccgacgatgtacgtcaggtgtgcaacctcgccgatccggtggggcaggtaatcgatggcggcgtactggacagcggcctgcgtcttgagcgtcgtcgcgtaccgctgggggttattggcgtgatttatgaagcgcgcccgaacgtgacggttgatgtcgctagcctgtgcctgaaaaccggtaatgcggtgatcctgcgcggtggcaaagaaacgtgtcgcactaacgctgcaacggtggcggtgattcaggacgccctgaaatcctgcggcttaccggcgggtgccgtgcaggcgattgataatcctgaccgtgcgctggtcagtgaaatgctgcgtatggataaatacatcgacatgctgatcccgcgtggtggcgctggtttgcataaactgtgccgtgaacagagcacaatcccggtgatcacaggtggtataggcgtatgccatatttacgttgatgaaagtgtagagatcgctgaagcattaaaagtgatcgtcaacgcgaaaactcagcgtccgagcacatgtaatacggttgaaacgttgctggtgaataaaaacatcgccgatagcttcctgcccgcattaagcaaacaaatggcggaaagcggcgtgacattacacgcagatgcagctgcactggcgcagttgcaggcaggccctgcgaaggtggttgctgttaaagccgaagagtatgacgatgagtttctgagtttagatttgaacgtcaaaatcgtcagcgatcttgacgatgccatcgcccatattcgtgaacacggcacacaacactccgatgcgatcctgacccgcgatatgcgcaacgcccagcgttttgttaacgaagtggatagctccgctgtttacgttaacgcctctacgcgttttaccgacggcggccagtttggtctgggtgcggaagtggcggtaagcacacaaaaactccacgcgcgtggcccaatggggctggaagcactgaccacttacaagtggatcggcattggtgattacaccattcgtgcgtaaataaaaccgggtgatgcaaaagtagccatttgattcacaaggccattgacgcatcgcccggttagttttaaccttgtccaccgtgattcacgttcgtgaacatgtcctttcagggccgatatagctcagttggtagagcagcgcattcgtaatgcgaaggtcgtaggttcgactcctattatcggcaccattaaaatcaaattgttacgtaagatcttatcattctcccaccaaaaaattatcttaatgtaacagctggtgtaagtaaattctatcaacgaagatcaatcttatctactgaccaaaaaggcctgatagggcttcgctcactatacatccttggctgcaggtttagttgtacaccactcctaaatttaatgtgttggcaatgtgttcaataaagctcgaacaaattagctcattatgatcggttaatacttcaacttctggttgcatgattgtttgtccgtaaaaagataacgcgcctgccgggtagtagcaggcgcattacgcaataggtaaacaagggaggaagttcagaaatgtaaatcgggaaggttgtacgcaatgttcatcgtactacgttgttacggctttgccgcaacaagccagttgcctgccgcgctcgcagaatgtctgcagcccggagataaggagattgttcctgccagctaaatcccttcctgtcgatacgaaccagctcgtatttttctaccagaaaattcacggcatcggctagggtgataccggcatcgatagtctgtatcaggaatgttcgggttaaatatcagcaaaaagcccgcatcatgaatactggatatgaagcatgagagttacctcagtgtttatataaggattcggtccccctctctggaacggtaactctcaatctgatcggttcctgcgttagttcacatcacgactcattttttcgctctcaccggcatcccatttgccacaaaatatcccgccgtgctcctcggcagcgcttcctgtccacgaatcatatccgctattttctcgccaatcataattgtcgtggcgttcaaattcccggtgataatctgcggcataatgctcgcatccaccacacgcaggccttctaacccgtgtacgcggccttcgccgtcaaccacggacatctcgtcgtaacccattttgcaggtaccgcacggatggaaggcggtttcggcgtggttacgcacgaactcatcgagctgttcatccgtctggcattcgacaccggggctgatttcgcggccacgatactgatccagcgcgggttgatgcatgatctcgcgggtgatgcgaattgcgtcgcggaactcctgccagtcctgctcgtggctcatgtagttaaacagaatcgccggatgctggtgcgggtcgcgggatttaatccgcacatgcccacggcttgggctgcgcatactgccgacgtggcactggaaaccgtgctctttcactgcattgctgccgttatagttaatcgctactggcaggaaatggtactgaatattcggccacgcaaattcctcacggctgcgaataaatccacctgcttcaaagtggttgctggcaccaacgccagtgccgccaaacagccactccgcaccgattttcggctggttccaccactgcagggcagggtagagggaaaccggttctttgcactcatattgcagatacatctccagatgatcctgaagattttcgccgacgccgggtaattcatgcaccagcggaatatcaaactccgccagcagttcagcgttgccgacgccggagcgttgcaggatctgcggactggcaatcgcgcctgcacataacagcacttctttgttggccgttgcgcgggttgggatggtgctgtcgccttccagccattcgacgcccaccgcgcgtttgccgtcaaaaatgatgtgatcggtcatagcgtgagtacgaatggtcaggttaggacggcttttggcctgatcgagatagccacgcgcggtgctggcgcgacggccctgcggcgtgacggtgcgatccatcggaccaaaaccttcctgctgataaccgttgagatcgtccgtgcgcgggtagcccgcctgcacgcccgcttcaatcatcgcttcaaacagcggattgacgccgggtttggaggtagtgacgctcaccgggccatcaccgccgtgatagtcgttttcacccatatcgcgagtctcggccttgcggtagtagggcaggcagtcgaggtagctccagttctccagaccgggttcttgcgcccagttatcgagatccagcgcattgccacggatgtagcacatgccgttgatcaggctgcttccacccagacctttaccgcgtccgcactccatgcggcggttattcataaacggttcaggttccgtttcataggcccagttgtagcgtttaccctgtagcgggaatgccagggcagcgggcatctgggtgcggaagtcaaagcgatagtccgggccgcccgcttcaagcagcagcacggaggtattcggatcttcagtcagacgggtagcgagaacgttgccggcactgccggcaccaataatgatgtagtcaaattgcaaataaacctcctggttagaatatggactggaatttagccatctcaacctggatggacttcacctgggtgtaactctggagcgtcatcacgccgttctcgcgaccaatgccggagtgtttgtagccgccaacgggcatctctgccggggattcgccccaggtgttgatccagcaaatacccgcttccagctgatgaatgacgcgatgcgcgcggttcaggtccgctgtcacgatgcccgccgccaggccgtagtcggtatcgttagcgcggcgaatgacttcgtcttcgctctcgtaggtcagaatggacatcactggcccgaagatctcttcacgcacgatggtcatatcgtcgctgcaatcggtgaacactgtcggtgcaacccatgcgccgttatcgaagccatcgcctttcagtacatcgccgccgcacagtacgcgcgcgccttcctctttgcctttggcgatatagcgcagcacgttatcgcgatgcgggaagctgaccagcgggccgaagttagtttgcggatcgaaaacgtcgcccgcgcgaatgcgctcaacgcgcgccagaattttctgctcaaatgcggctttgcatttcgccggaacgaagacgcgggtgccattggtacacacctgaccggagctgaagaagtttgccatcatggcgatatcggcggcgagatcgagatccgcatcatcgaaaacgatcagcggacttttaccgcccagttccatggtcacttctttcagggaagaggccgcgctgttagccatcacttttttgccgctggcgacaccgccggtaaaactcactttggcaatgcccggatgctcggtcagatattgcccggtctccgcgcccacgcccggcaacacgttaaatacgccgtccggcaggcccgcttcgctgtaaatttcagccagctttaacgcggtaagcggggtaacttcgctcggtttgaaaatcattgcgttgcctgccgccagcgccggggcggatttccacagggcaatctggatcgggtagttccatgcgccaatccctgccactacgcccagcggttcgcggcgggtatacacaaaggacgtttcacgcaacgggatctggctgccttccagcgccgggatcagcccggcgtagtactccagcacgtccgcaccggtaacgatatcgacggtactggtttcgctatatgcttttccggtgtcgagggtttccagttttgcgagttcgtcattgcgttcacgcagaatatcaacggcccgacgcagaatacggctgcgctccatggcggtcatgctcgcccagattttttgcccctgctgggcgcttttcacggcgcgatcgacatcctcgcgcccggcggcctgcacggtcgccagcacgttaccgttggccgggttaatggtctcgaaggtgcgaccgctggtggcggaggtataaccaccatgtatataaagctgctgttctgccattcgggacatcacgtctcctcggttaatcggtgggtagatgctgagtgataaagtggcgggtcagggaattagcgcgggttttatccagcggtttgccgctcagagccgcgcgcagccataatccatcaatcagcgcggccaggccgtagcccgcttcctgtgcctgttcgcgcggcaattcgcgacgaaactcgctcaccagattgctcagcaagcggcggctgctgacctgctgtaaacgatagagcatcggctgatgcatactgctggcccagaacgccagccaggctttcatcgccgcactgctcacctgcgtttcatcgaagtttccgccaacaatcgcctgtaatcgctgctctgcactgccctgcggaagtgcatgtaatcgattcaaaaccgcgtcacgcagctgactggtgatatcgcgcatggttgcttccagcagaccatttttgtccctgaaatagtggctgatgatccccgtagaaacgcctgcacggcgggcgatctgcgcgatcgttgcatcgtgcatgcccacttcatttattgcttccagtgtggcgtcgatcagttgtctgcgccggatgctctgcatccccaatttgggcattttcgccactccattcatcagcggtgtttatctattaaagcggttattgattggacgttcaatataaaatgtgtcttaattgttacgaatttgattttaaatagtaacaataacagtggggatactggatgacagaccttagtcacagcagggaaaaggacaaaatcaatccggtggtgttttacacctccgccggactgattttgttgttttccctgacaacgatcctgtttcgcgacttcagcgccctgtggattggccgcacgctggactgggtttctaaaaccttcggttggtactatctgctggcggcaacgctctatattgtctttgtggtctgtatcgcttgtagccgttttggtagcgtgaagctcgggccagaacaatccaaaccggaattcagcctgctgagttgggcggcgatgctgtttgctgccgggatcggtatcgacctgatgttcttctccgtagccgaaccggtaacgcagtatatgcagccgccggaaggcgcgggacagacgattgaggccgcgcgtcaggcgatggtctggacgctgtttcactacggcttaaccggctggagcatgtatgcgctgatgggcatggcgctcggatactttagctatcgttataatttgccgctcaccatccgcagcgcgctgtacccgatcttcggtaaacggattaacgggccgataggtcacagtgtggatattgcagcggtgatcggcactatcttcggtattgccactacgctcggtatcggtgtggtgcagcttaactatggcttgagcgtactgtttgatattcccgatagcatggcggcgaaagcggcactgatcgccttgagcgtgataatcgccacgatctctgtcacctccggtgtcgataagggcattcgcgtgttaagcgagcttaatgtcgcgctggcgctgggattgatcctgttcgtattgtttatgggcgacactagcttcctgcttaatgcactggtgctgaatgttggcgactatgtgaatcgctttatgggcatgacgctcaacagttttgccttcgaccgtccggttgagtggatgaataactggacgctcttcttctgggcatggtgggtggcatggagcccgtttgtcggcttgttcctggcgcgtatcagccgtgggcgtaccattcgccagttcgtgctgggcacgttgattattccgtttaccttcacgctgttatggctcagcgtgttcggcaatagcgcgctgtatgaaatcatccacggcggcgcggcatttgccgaggaagcgatggtccatccggagcgcggcttctacagcctgctggcgcagtatccggcgtttacctttagcgcctccgtcgccaccattactggcctgctgttttatgtgaccagcgcggactccggggcgctggtgctggggaatttcaccagccagcttaaagatatcaacagcgacgcccccggctggctgcgcgtcttctggagcgtggcgattggcctgctgacgctcggcatgctgatgactaacgggatatccgcgctgcaaaacaccacggtgattatggggctgccgttcagctttgtgatcttcttcgtgatggcggggttgtataaatctctgaaggtagaagattaccgccgtgaaagtgccaaccgcgataccgcaccgcgaccgctggggcttcaggatcgcctgagctggaaaaaacgtctcagccgcctgatgaattatccgggcacgcgttacactaaacagatgatggagacggtctgttacccggcaatggaagaagtggcgcaggagttgcggttgcgcggcgcgtacgtggagctaaaaagcctgccaccggaagagggacagcagttgggtcatctggatttgttggtgcatatgggcgaagagcaaaactttgtctatcagatttggccgcagcaatatagcgtgccgggctttacctaccgcgcacgcagcggtaaaagcacctactaccggctggaaaccttcctgttagaaggcagccagggcaacgacctgatggactacagcaaagagcaggtgatcaccgatattcttgaccagtacgagcggcaccttaactttattcatctccatcgtgaagcgccgggccatagcgtgatgttcccggacgcgtgattgttattgcataaaaccgcgccatgtctgcatatggcgctgtttctcctacctcttgatacgttatatctatacggttaagcccttagtatctattgatgattaccagacaacagataataaaaaagaaaagaactattgcagcccaaaacctacatttgggctgttgcgaatgttcaataagtttagtcttatttaatgtaaatattgctgatcatttgaaatgacgcattattcatgagaaatgtgtatcgtaaatcaactgaaattaacgcaaccatttgttatttaaggtttaattatctgtgtgtgatattttattgaatgttttaaatattgtttttattggcattgctataatattggttatcatttgctgaatggattcagtcttaatgagtgggtttttaagggacaggcatagagtaatgatacgtatgcataaccaacatctttactcattatgtcattgaatgttgacgctatgtgtttatgagggagaggtattttcagttgatctggattgttaaattcatataatgcgcctttgctcatgaatggatgccagtatgtagtgggaaattataaatattgaaatagtccaactacttctttattaccaaaaatgagtatctgaattttaatattgcattcttgcgtgattatctcctgagtttgacttgtgattacctttttaaggtatttagcgtaactgtttttgagcgagcatcagaggtaaagataatcttcttgatagtgatgtgggatgttatacgtatggcatcgctgatgtttatggttaccccttatgtgtgctcaggaatcgacaggtaatcactcatactgaacagcgataaaagataaaggtgtgttcatgaatagttgtgattttcgtgtttttctgcaagagttcggtacaacggttcatttgagtttgcctggtagcgtatccgagaaagaacgactgctactcaagctgctgatgcagggaatgtctgtaacagaaataagtcagtacagaaatcgcagtgcaaagacaattagtcatcaaaagaaacagctctttgagaaactggggattcagagcgatattactttctggcgcgatattttctttcagtacaatccggagatcatatccgccacggggagtaatagtcacagatatattaatgataatcactatcaccatatcgtcacgcctgaagccatcagtctggcgttggaaaaccacgaattcaaaccgtggatccaaccggttttctgcgcgcagactggcgtactgacgggctgtgaggtgcttgtccgctgggaacatccacaaacgggaattatcccaccggatcagtttattcctctggcggagagttccggtcttattgtcataatgacccgccaactgatgaaacagactgcggatattctgatgccggtaaaacatttgctgccggacaatttccatattggcatcaacgtcagcgcgggttgttttttggcagcgggatttgaaaaagagtgtctgaacctggttaataaattaggtaacgataaaatcaagctggttctcgagctaacggaacgtaaccctattccggtaacgccagaagccagagcgatatttgacagccttcatcagcacaacattacctttgcgctggatgactttggtacgggttatgcgacctatcgttacttgcaggcgttcccggtcgattttattaagatcgataagagttttgtgcaaatggcgagtgtcgacgaaatctccggtcatattgtggacaatattgtcgaactagcgcgtaagcctggtctgagtatcgtggcggaaggggtagaaacccaggagcaggcggatttaatgatcggtaaaggcgttcactttttgcagggctatttgtactctccgccagtaccgggtaataaatttatctctgaatgggtaatgaaagcaggtggttgatgtaaaccgctattcacagcgcatcgggaggttggcagcgattaattctcccgatgcagtaaatcctgatagatccccgttaatatgccatttggcgcaaattgttttttaatccactgcgtcacctgacccgtagcagaatgctgagtcgccagtaacatgcggctatcctggcgcggattatggatttgtcgggtaaccagcagggattgcgtcatcgcctcacggaccatgtaatccggcaaaaaaccaattccttcacctaaaatctggcactgacatttggtgttgaaatctggcaccagaatactctcctgcccgtgcagcaaccagcccacttttttattaatcgtatgcgcggtgtcctccaccataatattagggtagagacgcagttggctttcggcgatgggttccggcacaaaggctaacgggtgatccggggcgatagcaaaagcccagcgaatcgcgccaatttcagtgtaatcaataccgccgccgtccagtagtgtatcgggtgcgccgatggcgatattggcctgattattaataatcgcatcccagacgccgttatacacttcggtggtgacggtaatctggcaggtaggaaactgctttttcagcacctgtaacaagcgtgcggtgtgtttgggcgtataaagcagctgattaatacaaatgcgcacacgcgcttctatgccctggctaatagtatcgattctgcgtttgatggcataaaaatcattcagcaggtcggtagctttgcggaaaaaataacgcccggactccgttaactcaatgctgcgggtactgcgagtgaacagcaccacatccagccccgtctccatacgcttaatggtgtagctaatggcggaagtggttaaacccaactcttctgcggctttactgaagctgccaaaacgcgcagcggtagtaaatgccaacagattctcttcggtaaaaatactgttcattaaaccattctcgccattatctactatgaatttctccagctatgactgtagaggtatcggttaaagatagataatcatttttgaataacttttaatacccgtcgcgtttagtcgtcgcttcgcttaatttttgtccaccatattcactaattacccccacgcagttacccgccagaaaacccagtaacgtcaccgtccagttcatcccgctggcaaaaaacagcgtcatgccgagaaagccaccgggaataaaggacagtaaccagaaacgcccttgccagaccactaccgcgctgaagggtacggtagtaattacgctcgcccagaacgcggacagtccacttacagaggccagccaaccagcagtcagcgcggcgaaaaacgcccacaccatcccggaataattaaccgccagacttctgataaacccgcttttaccgccgcctgcggcataaaaactgcaaaaggcgacgaagccaatggttcctaataattcccatccttgagagagcccgacatgactagacactaactgccaaagccctgcacaaataccgacggtgacacccgttgccgtgagtccgttcatcttgttcccctctggttagacatggacgaaagctactcttacatgtgcagactatagagaaataaaacctgattgagtgaaagggtatcgggtcaaagaaacaaatattgcactaccgcacactgcgaaaagattgttgaatattattcaacaaaaaggcgagatacggcgaattaaatttaagcgggttcttttatcagattatcgttgctattctcaattcatcgaaaacagccacaaaaaccaggggaatgtgaatgagtataaaaaatctacctgccgactatttattggctgcacaacagggtgatatcgataaagtaaaaacctgccttgcgctgggtgtcgatattaatacctgcgatcgtcaggggaaaacggcaattacgctggcaagtttatatcagcaatatgcttgcgttcaggcattaattgatgccggagcggatattaataagcaagattatacctgtttaaatccttttttaattagctgtctgaacgatgatttaacgctactacgaattattttaccggctaaacccgatcttaattgcgtaacccgttttggcggtgtcggcctgacgcctgcctgtgaaaaaggccatttaagtattgtaaaagagcttttggcgcatacggagattaacgttaaccagaccaaccatgtaggctggacgccgctactggaagcgattgtgcttaatgatggtggtattaaacagcaggcgattgtgcagttattgctggaacacggtgccagcccgcatctgaccgataaatatggcaaaacgccactggaactggcgcgggaacggggctttgaagagattgcgcagttactgattgccgcaggtgcataaaccgggaggcttgctatcaacacaccagaaagacggtgtgtgtgggcgctaactgcggatgcggattttctggcgcagcgggggcaaggacaggttgaacaggtctttgccagagcggtaaatatcgcactcccggctcgccagcagttgctgacgctgctttgtgaagagtacgacaatgcgccaaacagttgtcggttggcactcactcactttgatgatctgttccggcatggtgataaggttcagtttgacgatcaaggtattacggttggtcaacatcttcatatagagatgagtcgttgtcggcgttggctgtccccaaccttgcaaatgaccgctgtgaattttcaccttatcgcctggctacagtggcacgacattattcatcagcacctgggggaaaatgaaaccctgtttaattatcgcggcgataatccgttttatcaggcgttaaataaagaattacatattaaacgacgggcagttattcaggccgtaaacgataaacaaaatatcgccagtgcggtcgccagtatgatggggttagggattggccttacgccaagtgccgacgattatttaacaggtctggcgcttattttatttattcccgggcatccggcggaaaaatacaaagaggaattttatctcggtctgcaacgcggcaaaaataataccacattattaagtgccataacgctggaagccgcattacaacaacgctgccgggaaaatattcatcgttttattcacaacattatttatgacatccctgggaacgcaactcaggcaatagaaaaaattaaacatattggctccagttccggctgcgacatgctgtatggcatggccgatggttgtgcgctgagccaaacctacggagggaattatgtcagttaattaaccaaacctacggagggaattatgagtgttaaaatagtcattaaaccgaatacctattttgattctgtcagcctgatgtctatctccacgcgtgcaaataaactcgacggcgtcgagcaggcatttgtggcgatggcgaccgaaatgaataaaggcgtgctgaagaatttaggactgctgacgccggagctggagcaggcgaaaaacggcgacctgatgattgtcatcaatggtaaaagcggtgcggacaacgagcagttactggtggagattgaagaactgttcaacaccaaagcgcaaagcggcagccacgaggcgcgttacgccactattggcagcgccaaaaagcatatcccggaaagtaacctggcggtgattagcgtcaacggtctgtttgccgctcgcgaagcgcgtcaggcgctgcaaaacgatctcaacgtgatgctgttttccgataacgtcagtgttgaagatgaactggcgctcaagcaactggcccacgaaaaagggctgctgatgatggggccagactgtggcacggcgattatcaacggcgcggcgctctgttttggtaacgccgtgcgtcgcggcaacatcggtattgttggcgcatccggcaccggcagtcaggagttgagcgtccgcattcatgaatttggcggcggcgttagccaactgattggcaccggcgggcgcgacctgagcgagaaaatcggcggcctgatgatgctcgacgccatcgggatgctggaaaacgatccgcaaactgaaatcattgcgcttatctccaaaccgcctgcgcctgcggtggcccgcaaagtgctggaacgtgcgcgcgcctgccgcaagccggtggtcgtctgcttcctcgatcgtggcgaaacgccagtggatgagcaggggctacagtttgcccgcggcaccaaagaggcagcgctaaaagcggtgatgctctccggcgtgaaacaggaaaatctcgacctgcatacgcttaaccagccgttgattgcggatgtgcgtgcgcgtctgcaaccgcagcagaaatacattcgtggcctgttctgcggcggcacgctgtgcgacgaaaccatgttcgcggtgatggaaaaacatggcgatgtctacagcaacattcagcccgatccggaattccgcctgaaagatatcaaccgcagcatcaaacacaccttcctcgactttggcgatgacgacttcaccaatggcaagccgcacccgatgattgaccccaccaaccgcatcagtcgcttgatcgaagaggcgcgcgatccagaagtggcggtgatcgtgatggattttgtgctcggatttggaagccatgaagatccggtcggctccaccatcgagacgatcaaagaagcgaaagcgatcgccgctgccgaaggacgcgagttgatcattctcgcctatgtgctgggtaccgatcttgatacgccaagcttagaacaacaaagccagatgctgcttgatgccggagtgattctggcgagcagcagcaccaataccggattgctggcgcgtgaatttatctgcaaaggggaggaagcctgatgagccagagtctgtttagccaaccattgaacgttattaacgtcggcatcgccatgtttagcgatgacctgaaaaagcagcatgtagaagtgactcaactcgactggacgccgccggggcagggcaatatgcaggtggtgcaggcgctggataacattgccgatagcccgctggcggacaaaatcgccgccgctaaccagcaggcgctggagcgtattatccagagccatccggtgctgattggttttgatcaggcgattaacgtggtgccgggcatgacggcgaaaaccattcttcacgccgggccgccgatcacctgggaaaaaatgtgcggcgcgatgaaaggcgcggtcaccggagcgctggtgttcgaaggactggcgaaagatctcgacgaggcggctgaactggcggcttccggggagatcaccttcagcccgtgtcacgagcacgactgcgtgggaagcatggcgggtgttaccagcgccagcatgtttatgcacatcgtaaaaaacaaaacctacggcaacatcgcttataccaacatgagcgagcagatggcgaagattttgcgtatgggcgctaacgaccagagcgtgattgaccgcctgaactggatgcgtgatgtgcagggaccaatactgcgcgacgcgatgaaaattatcggcgaaatcgatctgcgcttaatgctggcgcaggcgctgcatatgggcgatgagtgccataaccgcaataacgccgggacgacactgctgattcaggcgctgacgccggggattattcaggcgggttattccgtcgagcaacagcgcgaagtgtttgagtttgtcgccagcagcgactacttctccggcccgacgtggatggcgatgtgtaaagcggcgatggatgcggcgcatggcatcgaatacagcaccgtggtcaccaccatggcgcgtaacggcgtcgagttcggcctgcgggtcagcggcctgccggggcaatggtttaccggcccggcgcagcaggtgatcggcccgatgtttgccggttataagccggaagatagcgggctggatatcggcgacagcgccatcaccgaaacctacggtattggcggatttgctatggcgaccgcgcccgctatcgtcgcgctggtgggcggcacggtggaagaagctattgatttctcccgtcagatgcgcgaaatcaccctcggtgaaaaccccaacgtcaccattccgctgctcggttttatgggcgtgccgagcgcaatcgacatcacccgcgtgggtagcagcggcattctgccggtgatcaacaccgccatcgcccataaagatgcgggcgtcggcatgattggcgcgggcattgtgcatccaccttttgcctgcttcgagaaagccattcttggctggtgcgaacgttacggcgtctgacctacatgttcatgccggatgcggcgtgaacgccttatccggcctacgaatggcgcaagaatctgtaggcctgataagcgtagcgcatcaggcatttgtcaccattgccggatgcggcgtgaacgccttatccggcctacgaatggcgcaagaatctgtaggcctgataagcgtagcgcatcaggcatttgccaccactgccggatgcggcgtggacgccttatccggcctacgagtggcgcgagaatctgtaggcctgataagcgtagcgcatcaggcatttgtcaccattgccggatgcggcgtgaacgccttatccggcctacgagtggcgcgagaattgtaagcctgataagcgtagcgcatcaggcagtctggcgttggtcataaccccatcaccctctgtagcggacataacaacatgaaagagcttgtggtcgttgccattggtggcaacagcattatcaaagataacgccagccagagcattgagcatcaggcggaggcggtgaaagccgtcgccgatacggtgctggaaatgctggcttccgattacgacattgtgctgacccacggcaacgggccgcaggtcgggctggatttacgccgtgcggagattgcccacaagcgcgaagggctgcccttaacgccgctggcgaactgtgtggcagatacgcagggcggcatcggctatctgatccaacaggcgctgaataaccggctggcgcgtcacggcgagaagaaagccgtcaccgtggtgactcaggtggaagtggataaaaacgatccaggttttgcccatcccaccaagcccatcggcgcattctttagtgacagccagcgtgacgaattacaaaaggcaaaccctgactggtgttttgttgaagatgccgggcggggctatcgccgcgtggtcgccagcccggaaccgaaacgtattgtcgaagcacctgccattaaagcgctgatccaacaaggttttgtcgtaattggcgcgggcggcggtggaattccggtagtgcgtactgacgcgggagattaccaaagcgtggacgcggttatcgacaaagatctctctaccgcgctgctggcccgtgaaattcacgccgacattcttgtgatcaccactggcgtcgaaaaagtgtgtattcactttggcaaaccgcagcagcaggcgctcgatcgggtggatattgccaccatgacccgctatatgcaggaagggcatttcccgcccggcagcatgttgccaaaaatcatcgccagcctgacatttttagaacaaggcggcaaagaagtgattatcaccacgccggaatgcctgcctgcggcgctgcgcggcgaaacgggcactcatattattaaaacgtaaggacgtaagatgaaagaaagcaatagccgccgtgaatttctgagccagagcggtaagatggtcaccgccgccgcgctgtttggtacctctgtgccgctcgcccatgcggcggtagctggcaccctaaactgcgaagcgaacaacaccatgaaaatcactgacccgcattactatctcgataacgtgctgctggaaaccggttttgactacgaaaatggcgtggcggtgcagacccgcacggcgcgccagaccgtggagattcaggacggcaaaattgtcgccctgcgcgagaacaagctgcatccggacgccacgctgccgcactatgacgctggcggtaagctgatgctgcccaccacccgcgacatgcatattcatctcgacaaaaccttttacggcgggccgtggcgcagcctcaatcgtccggcaggcaccaccatccaggacatgatcaaactcgagcagaaaatgctgccggaactgcaaccgtacactcaggagcgggcagaaaaactgattgatttattgcagagcaaaggcaccaccattgcccgcagccactgcaatatcgaaccggtttccggcctgaaaaatctgcaaaatttgcaggcggtgctggcgcgacgtcaggcgggctttgagtgtgaaatcgtcgccttcccgcagcacggtttgctgctgagcaaatctgaacctttaatgcgtgaagcgatgcaggcgggggcgcattacgtcggcggcctggacccgaccagtgttgatggcgcgatggaaaaatccctcgacaccatgttccagattgcgctggactacgacaaaggcgtcgatattcacctgcacgaaaccactccggcaggcgtggcagccatcaattatatggttgaaacggtagagaaaacgccacagctgaagggcaagctgaccatcagtcacgcctttgcgctggcaacgctcaacgagcaacaggtagatgaactggcgaaccggatggtggtgcaacaaatttctatcgccagcacggtgccgattggcacgctgcatatgccgctcaaacagttgcacgacaaaggcgtaaaagtgatgactggcactgacagcgttatcgaccactggagcccttatggtctgggcgacatgctggaaaaagccaatctgtacgcgcagctctatattcgtcctaacgaacagaacctctcccgcagcctgtttttagccactggcgatgtattgccgctgaatgaaaaaggcgagcgtgtatggccaaaagcgcaggatgacgccagctttgtgctggtggacgcctcctgttccgccgaggcggtggcgcgtatcagcccgagaaccgcaacgttccataaagggcaactggtgtgggggagtgtggcaggttgatgcgcatttgaaacgcctgcaacggtgaatagtaagagatttaagccccagggagtggggcaatctgaatatgagtgtgtcggcagaaatggacattatctttgaggaatatgcccttattgacgttgtgtagataactatttgtctacgtgaaaagatcatcagttttgccgattttagtcttttacagatagcaaatatcacacttacaggcgctcgccttatggggaacgttgctgctctgtttcattcaggctcgcggcatgttggggctggatcgggtggtttaaatattggctatattcaatggacgcgttttgccgcgatgacatatcaggcgttgccaaatacacatagctaatcaggagtaaacacaatgaagatcaaagctgttggtgcatattccgctaaacaaccacttgaaccgatggatatcacccggcgtgaaccgggaccgaatgatgtcaaaatcgaaatcgcttactgtggcgtttgccattccgatctccaccaggtccgttccgagtgggcggggacggtttacccctgcgtgccgggtcatgaaattgtggggcgtgtggtagccgttggtgatcaggtagaaaaatatgcgccgggcgatctggtcggtgtcggctgcattgtcgacagttgtaaacattgcgaagagtgtgaagacgggttggaaaactactgtgatcacatgaccggcacctataacagcccgacgccggacgaaccgggccatactctgggcggctacagtcaacagatcgtcgttcatgagcgatatgttctgcgtattcgtcacccgcaagagcagctggcggcggtggctcctttgttgtgtgcagggatcaccacgtatagcccgctacgtcactggcaggccgggccgggtaaaaaagtgggcgtggtcggcatcggcggtctgggacatatggggattaagctggcccacgcgatgggggcacatgtggtggcatttaccacttctgaggcaaaacgcgaagcggcaaaagccctgggggccgatgaagttgttaacagtcgcaatgccgatgagatggcggctcatctgaagagtttcgatttcattttgaatacagtagctgcgccacataatctcgacgattttaccaccttgctgaagcgtgatggcaccatgacgctggttggtgcgcctgcgacaccgcataaaagcccggaagttttcaacctgatcatgaaacgccgtgcgatagccggttctatgattggcggcattccagaaactcaggagatgctcgatttttgcgccgaacatggcatcgtggctgatatagagatgattcgggccgatcaaattaatgaagcctatgagcgaatgctgcgcggtgatgtgaaatatcgttttgttatcgataatcgcacactaacagactgaaaaaattaataaataccctgtggtttaacatattaacttcgctctccacttaactttttagttaaggagagcgaaataatatcaaagtagcagtaaaacctataacgtaaatttaaattgttaaattaacgccctccagtacacaatacttcacacgttagttatgagcgatttctgatagtgcctggtttaatcagagctttattatctgcgacgtttatttttatttaagagagatcgcgatgataagtttaaaagctccgcacaataatttgatgccatatacgcaacaaagcatacttaatacggttaaaaacaatcagttaccagaggatatcaaaagctccctggtttcctgtgtcgatatattcaaggttttgattaaacaatattatgattatccttatgattgtcgtgatgatttagtcgatgacgacaaactcattcatctcatggctgccgtacgagactgtgagtggagtgacgataacgcactcaccataaatgtgcagtttaatgatttccctggattttatgactggatggattaccctgatcacccggttaagtttgtttttcacatacttgaaaatcaaaaagggacagtttgggtatatgaccaggatgatgcgtttcttgatattaaagcaaacgtgcaggctggacgctttaccgggcttaagaaattagtgcagtttatcgatagtgtgcgaacagattgcaaatgtattcttcttgaataccatatgcctttgctgagaattttccctaaagggaaagagtgtatgcatgtggaaaaatggcttcgcgaaatgagctctattccggagacagacgcgcccattaagcaggcgcttgcgcatggattattattacacttaaaaaatatctaccctgtttttcctgaaagtctggtgatgttattgctctctgttctggacgtaaaaacatacagagatgatgcgcgattaaatgaatggatatctaatagagtgcaggaattaggtgacagatattatcctgtaaataagcacgttaaaatccgctacactctttaattcagaaagggttccacctgcaagttgttattccacctgagagtgaatcgcaatgcaggtaatcatttcatctgtatatctgtatgccaactggcattccatctcttttttcgccgatattttgttgtgatcggcgacacttcgcttaaaaaagcaccagtagtggtttcgcagccatgcggtgtataaaaaatgatctcatgcagatgttttgtgaatgtgttggttgacattcatatgaaaaaaatcataattccatcatgtttgtgtggggtcttttctgtatcttacgcatcgcactcaagcctgacagaaaatatgctgtaaggctcatatcaaaaaccgccattagctcatcaggaagagcagacgacaaccaggattgttgtatggtacggggttcgaggcctcgatggcggtccaacttttcaaaactcttctgaatcagatccccttattaagttccctgcaaagtggaacattgccattgtttggctatagtggatggggcagaccaatgaaaaaagcccacacaggggagagtgggctgaaatgggaggctaaagacagtagtaaacttatcggaaataaggaccacgcattacgggggctaagtagcccgatggccgtgattcggcaaatcaggttgattacgtaaagagtaaattatctgctcaccgctgcgtcaccccttcgtaaatcaggcgtagcgcgaatacaccaataattgcaccaataacccgactggcaacgcgttgcatacgcccataagcacgacgcacagcgggcaaagaaaacgcctgactaagaaaaactcgccagataatacttgcgagcacaatccccgcccaggccattaaacgtgcccatgttggtgtttctgcatttaatgttacactgaaaatactgataaaaaataaaacggtttgcgggttagagagatcggtaattaatccgcggcgaaaaaagacataccagggggcgctaatcggttgttgtagtgtgctcatttgcggtgtactctggcggcgcatgctgcaccacgcaaaccataagagataagcgccgccgacgattctgataaggctaaaaatctcctcacactgcgtaattagcgttgcaagaccaaacaaacccaacccggaataaaatgcatcgcccagcgccacgcccagcccggtcagcacccctgcgcgtcgaccggaagccaggctggtttgtactaccacaaagagattggctcccggattaaaaaaagtaatcacgaacagtcctacggtcaggtaaacggcatgcaaaggatccatagtgatttcatccataaataagtgaactaactgcatcatatttctaccaaaaataatcgggtgcgagagagatcacaaagtgtcttatttccggttactggcgtttatgccctgactgaactaattattaatcaacccaataatgtgggtgggtgatagtgtgataacaactctggagccgtaatatgaaaataatctctaaaatgttagtcggtgcgttagcgttagccgttaccaatgtctatgccgctgaattgatgaccaaagcggaatttgaaaaagttgaaagccagtatgaaaaaataggtgatattagtaccagcaatgaaatgagcactgcagatgcaaaagaagatttgatcaaaaaagcggatgaaaaaggggctgatgtgttggtactgacctccggtcaaactgacaataagatccacggcacggcaaatatttataagaagaagtaattctgaatcctatgtaaacatctccgatgcgtaagtttatcggtgatcatctattgaaatttatgccggataaagcgttcgcgctgcattcggcagttcagcttttcagccgccgccagaacgtcgtccggctgatgcctaaataattcgccgctgctgttttatcgccattaaatttctccagtgcctgttgtggtgtcagtaagcgtggagcgggagttttcgcgctctcgcgcgccagttccggcagtagcagttgcataaactgcggcgttaaatccggcgtcggttccacacttaaaaacagcgccagtcgttccatcatattgcgcagttcacgaatattgcctggccagtcgtagtgcagcagcacagtttcacttgcctgtaacccctggcgtaatgcagcagaaaatggggcggagagcgccgccagagacactttcaaaaagctttccgccagcggaagaatatccgccacccgctcgcgcagtggtggcaattgcagacgcaaaatactcagccgataaaacagatcacggcgaaaacgtccttgctgcatatcttcttccagattgcagtgagtggcgctaatgacccgtacatctaccggaacaggctgatgcccgccgacgcgggtgacctctttttcttccagcacccgcagcagccgggtctgcaaaggtagcggcatttcgccaatctcatccagaaacagcgtaccgccgtgggcaatttcgaacagcccggcgcgacctccgcgtcggctgccggtaaacgccccttcctcatagccaaacagttctgcttccagcaggctttcggcaatcgccccgcagttgacggcaacaaacggatggctctttttgccctgtcgcgcatcgtggcgggcaaaatattcccgatgaatcgcctgggccgccagctctttgcccgtccccgtttccccctcaatcaacaccgccgcactggagcgggcatacagcaaaatagtctgccgtacttgttccatctgtggactttgaccgagcatatcgcccagcacgtaacgagtacgcagggcgttgcgggtggcatcgtgagtgttatggcgtaagctcatgcgcgtcatatccagcgcatcgctgaacgcctggcgcacggtggcggcggaatagataaaaattccggtcattccggcttcttctgccaaatcggtaatcagccctgcgccgaccaccgcttcggtgccgttagcttttagctcgttaatctgcccgcgtgcgtcttcctcggtaatgtagctacgttggtcgaggcgcaaattaaaggttttttgaaacgccaccagcgctggaatggtttcctgataggtgacaacgccgatagaagaggtgagttttccggcttttgccagtgcctgtaacacatcgtagccgctcggtttaatcaaaataactggcacactcaggcggcttttcaggtacgcgccgttagagccagccgcgatgatggcgtcacagcgttcgtttgccagtttcttgcggatgtaggtcactgctttttcaaagccaagctgaataggggtaatgttcgccaggtgatcaaactcgaggctgatatcgcgaaacagctcgaacaggcgcgttacagataccgtccagataaccggtttgtcgtcattaagccgtggtggatgtgccatagcgcaccgcaaagttaagaaaccgaatattgggtttagtcttgtttcataattgttgcaatgaaacgcggtgaaacattgcctgaaacgttaactgaaacgcatatttgcggattagttcatgactttatctctaacaaattgaaattaaacatttaattttattaaggcaattgtggcacaccccttgctttgtctttatcaacgcaaataacaagttgataacaaaggatgggctatgtctctacactctccaggtaaagcgtttcgcgctgcactgactaaagaaaatccattgcagattgttggcaccatcaacgctaatcatgcgctgttggcgcagcgtgccggatatcaggcaatttatctttctggcggtggcgtggcggcaggtagcctggggctgcccgatctcggtatttctacccttgatgatgtgctgaccgacattcgccgtatcaccgacgtttgtagcctgccgctgctggtggatgcggatatcggttttggttctagcgcctttaacgtggcgcgcaccgtgaaaagcatgattaaagccggtgcggcaggattgcatattgaagatcaggttggtgcgaaacgctgcggtcatcgtccgaataaagcgatcgtcagcaaagaagagatggtggatcggatccgcgcggcggtggatgcgaaaaccgatcctgattttgtgatcatggcgcgcaccgatgctctggcggtagaggggctggatgcggcgatcgagcgtgcgcaggcctatgttgaagcgggtgccgagatgttgttcccggaggcgattaccgaactcgccatgtaccgccagtttgccgatgcggtgcaggtgccgatcctcgccaacatcaccgaatttggtgccacgccgctgtttaccaccgacgaattacgcagcgcccatgtcgcaatggcgctgtacccacttagtgcgttccgcgccatgaaccgcgccgctgaacatgtctacaacgtcctgcgccaggaaggcacgcagaaaagcgtcatcgacaccatgcagacccgcaacgagctgtacgaaagcatcaactactaccagtacgaagagaagctcgacaacctgtttgcccgtagccaggtgaaataaaaaacgcccgttgattgtattcgacagccgatgcctgatgcgtcgctgacgcgacttatcaggcctacgaggtgcactgaactgtaggtcggataagacggatggcgtcgcatccgacaaccgatgcctgatgcgccgctgacgtgacttatcaggcctacggggtgcactgaactgtaggtcggataagacgcatagcgtcgcatccgacaaccgatgcctgatgcgccgctgacgcgacttatcaggcctacggggtgcactgaactgtaggtcggataagacgcatagcgtcgcatccgacaaccgatgcctgatgcgccgctgacgcgacttatcaggcctacggggtgaactgaactgtaggtcggataagacgcatagcgtcgcatccgacaacaatctcgaccctacaaatgataacaatgacgaggacaacatgagcgacacaacgatcctgcaaaacagtacccatgtcattaaaccgaaaaaatctgtggcactttctggcgttccggcgggcaatacggcgctctgcaccgtgggtaaaagtggcaatgacctgcattaccgcggctacgatattcttgatctggcgaaacattgcgaatttgaagaagtggcgcatctgctgatccacggcaaactgccgacccgtgacgaactcgccgcttacaaaacgaaactgaaagccctgcgcggtttaccggctaacgtgcgtaccgtgctggaagccttaccggcggcgagccacccgatggatgttatgcgcaccggtgtttccgcgctcggctgcacgctgccagaaaaagaggggcataccgtctctggcgcgcgggatattgccgacaaactgctggcgagccttagcagcattctcctttattggtatcactacagccacaacggcgaacgcatccaaccggaaaccgatgacgactccatcggcggtcacttcctgcatctgctgcacggcgaaaagccaagccaaagctgggaaaaggcgatgcatatcagcctggtgctgtacgccgaacacgagtttaacgcctccacctttaccagtcgggtgattgcgggcaccggctctgatatgtattccgcgattattggcgcgattggcgcactgcgcgggccaaaacacggcggggcgaatgaagtgagcctggagatccagcaacgctacgaaacgccggacgaagccgaagcagatatccgcaagcgcgtggaaaacaaagaagtggtcattggttttggtcatccggtttacaccatcgctgacccgcgccaccaggtgattaaacgtgtggcgaagcagctcagccaggaaggcggcagcctgaagatgtacaacatcgccgatcgcctggaaacggtgatgtgggagagcaaaaagatgttccccaatctcgactggttctctgctgtttcctacaacatgatgggcgttcccaccgagatgttcacaccactgtttgttatcgcccgcgtcaccggctgggcggcgcacattatcgaacaacgtcaggacaacaaaattatccgtccttccgccaattatgttggaccggaagaccgcccgtttgtcgcgctggataagcgccagtaaacctctacgaataacaataaggaaacgtacccaatgagtgctcaaatcaacaacatccgcccggaatttgatcgtgaaatcgttgatatcgtcgattacgtcatgaactacgaaatcagctctaaagtggcctacgacaccgcacattactgcctgctcgacacgctcggctgcggtctggaagctctcgaatacccggcctgtaaaaaactgctggggccaattgttcccggcaccgtcgtacccaacggcgtgcgcgtccccggaactcagttccagctcgaccccgtccaggcggcatttaacatcggcgcgatgatccgctggctcgatttcaacgatacctggctggcggcggagtggggccatccttccgacaacctcggcggcattctggcaacggcggactggcttagccgcaacgcggtcgccagcggcaaagcgccgttgaccatgaaacaggtgctgaccgcaatgatcaaagcccatgaaattcagggctgcatcgcgctggaaaactcctttaaccgcgtcggcctcgaccacgttctgttagtgaaagtggcttccaccgccgtggtcgccgaaatgctcggcctgacccgcgaggaaattctcaacgccgttagcctggcgtgggtggacggtcagagcctgcgcacctatcgccatgcgccgaacaccggcacgcgtaaatcctgggcggcgggcgatgccacttcccgcgcggtacgtctggcactgatggcgaaaacgggcgaaatgggttacccgagtgccctgactgcgccggtgtggggcttctacgacgtctcctttaaaggtgaaagcttccgcttccagcgcccgtacggttcctacgttatggaaaatgtgctgttcaaaatctccttcccggcggagttccactcccagacggcagttgaagcagcgatgacgctctatgaacagatgcaggcagcaggcaaaacggcggcggatatcgaaaaagtgaccattcgcacccacgaagcctgtattcgcatcatcgacaaaaaagggccgctcaataacccggcagaccgcgatcactgcattcagtacatggtggcgatcccgctgctattcgggcgcttaacggcggcagattacgaggacaacgttgcgcaagataaacgcattgacgccctgcgcgagaagatcaattgctttgaagatccggcatttaccgctgactaccacgacccggaaaaacgcgccatcgccaatgccattacccttgagttcaccgacggcacacgatttgaagaagtggtggtggagtaccccattggtcatgctcgccgccgtcaggatggtattccgaaactggtcgataaattcaaaatcaatctcgcgcgccagttcccgactcgccaacagcagcgcattctggaggtttctctcgacagagctcgcctggaacagatgccggtcaatgagtatctcgacctgtacgtcatttaagtaaacggcggtaaggcgtaagttcaacaggagagcattatgtcttttagcgaattttatcagcgtagcattaacgaaccggagcagttctgggccgagcaggcccggcgtattgactggcagacgccctttacgcaaacgctcgatcacagcaatccgccgtttgcccgttggttttgtgaaggccgaaccaacttgtgccacaacgccatcgaccgctggctggagaaacagccagaggcgctggcgctgattgccgtctctagcgaaacagaagaagagcgcacctttacctttcgtcagctgcatgacgaagtgaacgcggtggccagtatgttgcgtagtttgggtgtgcagcgcggcgatcgggtgctggtgtatatgccgatgattgccgaagcgcatattactctgctggcctgcgcgcgcattggcgctattcacagcgtggtgtttggtggatttgccagctacagcgtggcggcgcgaattgatgacgctaaaccggtgctgattgtcagcgctgatgccggagcgcgcggtggcaaaatcattccctataaaaaattgctcgacgatgcgataagtcaggcgcagcaccagccacgccatgttttgctggtggatcgcgggctggcgaaaatggcgcgcgtcagcgggcgggatgtcgatttcgcgagcttgcgccatcaacacatcggcgcgcgggtaccggtggcgtggctggaatccaacgaaacctcctgcattctctacacttccggcacgaccggcaaacctaaaggcgtgcagcgtgacgtcggcggatatgcggtggcgctggcgaccagcatggacaccatttttggcggcaaagcgggcagcgtgttcttttgcgcaagcgatatcggctgggtggtggggcatagctatatcgtttacgcgccgctgctggcggggatggcgactatcgtttacgaaggattgccgacctggccggactgcggcgtgtggtggacaatcgtcgagaaatatcaggttagccggatgttcagtgcgccgaccgccattcgcgtgctgaaaaaattccctaccgctgaaattcgcaaacacgatctcagcagcctggaagtgctctatctggctggagaaccgctggacgagccgaccgccagttgggtgagcaatacgctggatgtgccggtcatcgacaactactggcagaccgaatccggctggccgattatggcgattgctcgcggtctggacgacaggccgacgcgtctgggaagccccggtgtgccgatgtatggctataacgtgcagttgcttaatgaagtcaccggcgaaccgtgtggcgtcaacgagaaagggatgctggtggtggaagggccgctgccgccggggtgtattcagaccatctggggcgacgacggccgctttgtgaagacttactggagcctgttttcccgcccggtgtacgccacctttgactggggcatccgtgacgctgacggttatcactttattctcgggcgcactgacgatgtaattaacgttgccgggcatcggctggggacgcgcgagattgaagagagtatctccagccatccgggcgttgccgaagtggcggtggttggggtgaaagatgcgctgaaagggcaggtggcggtggcgtttgtcattccgaaagagagcgacagtctggaagatcgtgatgtggcgcacagccaagagaaggcgattatggcgctggtggacagccagattggcaactttggccgcccggcgcacgtctggtttgtcagccaattgccaaaaacgcgatccggaaaaatgctgcgccgcacgatccaggcgatttgcgaaggacgcgatcctggagatctgacgaccattgatgatcctgcgagcttggatcagatccgccaggcgatggaagagtaagttattgtcggatgcgtcgcgcggtgcatccggcactgtgtgccgatgcctgatgcgacgctgacgcgttttatcatgcctacggacctgaaccgtaggtcggataaggcgctcgcgtcgcatccgacaccatgctcagatgcctgatgcgacgctgacgcgtcttatcaggcctacccactgtttttacaccgataatttttcccccacctttttgcactcattcatataaaaaatatatttccccacgaaaacgattgctttttatcttcagatgaatagaatgcggcggattttttgggtttcaaacagcaaaaagggggaatttcgtgagccaagataacaactttagccaggggccagtcccgcagagcgcgcggaaaggggtattggcattgacgttcgtcatgctgggattaaccttcttttccgccagtatgtggaccggcggcactctcggaaccggtcttagctatcatgatttcttcctcgcagttctcatcggtaatcttctcctcggtatttacactagttttctcggttacattggcgcaaaaaccggcctgaccactcatcttcttgctcgcttcagctttggtgttaaaggcagttggctgcctagtctgctactgggcggaactcaggttggctggtttggcgtcggtgtggcgatgtttgccattccggtgggtaaggcaaccgggctggatattaatttgctgattgccgtttccggtttactgatgaccgtcaccgtcttttttggcattagcgcgctgacggttcttagcgtgattgcggttccggctatcgcctgcctgggcggttattccgtgtggctggctgttaacggcatgggcggcctggacgcattaaaagcggtcgttcccgcacaaccgttagatttcaatgtcgcgctggcgctggttgtggggagttttatcagtgcgggtacgctcaccgctgactttgtccggtttggtcgcaatgccaaactggcggtgctggtggcgatggtggcctttttcctcggcaacagcttgatgtttattttcggtgcagcgggcgctgcggcactgggcatggcggatatctctgatgtgatgattgctcagggcctgctgctgcctgcgattgtggtgctggggctgaatatctggaccaccaacgataacgcactctatgcgagcggtttaggtttcgccaacattaccgggatgagcagcaaaacccttagcgtaatcaacggtattatcggtacggtctgcgcattatggctgtataacaattttgtcggctggttgaccttccttagcgcagctattcctccagtgggtggcgtgatcatcgccgactatctgatgaaccgtcgccgctatgagcactttgcgaccacgcgtatgatgagtgtcaattgggtggcgattctggcggtcgccttggggattgctgcaggccactggttaccgggaattgttccggtcaacgcggtattaggtggcgcgctgagctatctgatccttaacccgattttgaatcgtaaaacgacagcagcaatgacgcatgtggaggctaacagtgtcgaataactaagacgcatgtggaggctaacagtgagcaataacgctttacaaacaattattaacgcccggttaccaggcgaagaggggctgtggcagattcatctgcaggacggaaaaatcagcgccattgatgcgcaatccggcgtgatgcccataactgaaaacagcctggatgccgaacaaggtttagttataccgccgtttgtggagccacatattcacctggacaccacgcaaaccgccggacaaccgaactggaatcagtccggcacgctgtttgaaggcattgaacgctgggccgagcgcaaagcgttattaacccatgacgatgtgaaacaacgcgcatggcaaacgctgaaatggcagattgccaacggcattcagcatgtgcgtacccatgtcgatgttagcgatgcaacgctaactgcgctgaaagcaatgctggaagtgaagcaggaagtcgcgccgtggattgatctgcaaatcgtcgccttccctcaggaagggattttgagctatcccaacggtgaagcgttgctggaagaggcgttacgcttaggggcagatgtagtgggggcgattccgcattttgaatttacccgtgaatacggcgtggagagcctgcataaaaccttcgccctggcgcaaaaatacgaccgtctcatcgacgttcactgtgatgagatcgatgacgagcagagccgctttgtcgaaaccgttgctgccctggcgcaccatgaaggcatgggcgcgcgagtcaccgccagccacaccacggcaatgcactcctataacggggcgtataccagtcgcctgttccgcttgctgaaaatgtccggtattaactttgtcgccaacccgctggtcaatattcatctgcaaggacgtttcgatacgtatccaaaacgtcgcggcatcacgcgcgttaaagagatgctggagtccggcattaacgtctgctttggtcacgatgatgtcttcgatccgtggtatccgctgggaacggcgaatatgctgcaagtgctgcatatggggctgcatgtttgccagttgatgggctacgggcagattaacgatggcctgaatttaatcacccaccacagcgcaaggacgttgaatttgcaggattacggcattgccgccggaaacagcgccaacctgattatcctgccggctgaaaatgggtttgatgcgctgcgccgtcaggttccggtacgttatagcgtacgtggcggcaaggtgattgccagcacacaaccggcacaaaccaccgtatatctggagcagccagaagccatcgattacaaacgttgaacgactgggttacagcgagcttagtttatgccggatgcggcgtgaacgccttatccggcctacgtagagcactgaactcgtaggcctgataagcgtagcgcatcaggcaattccagccgctgatctgtgtcagcggctaccgtgattcattcccgccaacaaccgcgcattcctccaacgccatgtgcaaaaatgccttcgcagcggctgtctgccagctgtagtttatgccggatgcggcgtgaacgccttatccggcctacgtagagcactgaactcgtaggcctgataagcgtagcgcatcaggcaattccagccgcagacctgtgtcagcggttaccgactttcatttccgccaacaaccgcgcatttatccaacgccatgtgcaaaaatgccttcgcggcggctgtctgccagctatttttccgccgcaacaaaaccgccgttctctccagtagtggcggggcaagagaaatagctttaagcccgtcatgttgtgtggcaatcgctgctggtaacaatgtggaaagggaagtgcggcgaatcagctccagaaccgcgctaatactgttcgcctcaatgaccacctgtggatgtagccccgctttctcgcagtagtggtcaatttgctctctggtggcaaattccgcgctgagcaggaccagtttttcatcatgcaagcgactcaacgccacctgttcatggacggccagcggatgatgttgcgccacgactaacgctaaactttctgtcagtaaaggaattgcctccagctccgggctatgcacaggcgcgaaggcaatcccaacgtccaactcgtcgcggcaaagcatatcctcgattttctcctggctcatttcctgtagctggagcgtgatgctgggatagcgcgcatagaaatccgccattaaggggccgataaagtagctcgtaaaggtgggggtgacggcgatacgcaggcttcctcgcgtcagatcggcaacatcatgaatcgcccgtttacccgcccccagttcctgtaacgcccggctggcgtactgtcgccagacttctcctgcatcagtgagacgaatcgttcgcccgctacggtcaaacagcggcacgcctaaactctcctctaactggcgaatctgctgggaaagcgcaggttgggagacgtgcaacgcactggcggcacgggtgaagctgccatgttcagccacggcaagaaaataattgatatgtcgagagagcattcgcaacctataagtaaatccaatggaactcatcataaatgagacttttaccttatgacaatcggcgagtagtctgcctctcattccagagacagacagaggttaacggtgaaagagattattgatggattccttaaattccagcgcgaggcatttccgaagcgggaagccttgtttaaacagctggcgacacagcaaagcccgcgcacactttttatctcctgctccgacagccgtctggtccctgagctggtgacgcaacgtgagcctggcgatctgttcgttattcgcaacgcgggcaatatcgtcccttcctacgggccggaacccggtggcgtttctgctagcgtggagtatgccgtcgctgcgcttcgggtatctgacattgtgatttgtggtcattccaactgtggcgcgatgaccgccattgccagctgtcagtgcatggaccatatgcctgccgtctcccactggctgcgttatgccgatagtgcccgcgtcgttaatgaggcgcgcccgcattccgatttaccgagtaaagctgcggcgatggtacgtgaaaacgtcattgctcagttggctaatttgcaaactcatccaagcgtgcgcctggcgctcgaagaggggcggatcgccctgcacggctgggtctacgacattgaaagcggcagcatcgcagcttttgacggcgcaacccgccagtttgtgccactggccgctaatcctcgcgtttgtgccataccgctacgccaaccgaccgcagcgtaaccttatttttaaaccatcaggagttccaccatgattcagagtcaaattaaccgcaatattcgtcttgatcttgccgatgccattttgctcagcaaagctaaaaaagatctcagttttgccgagattgccgacggcaccggtctggcagaagcctttgtaaccgcggctttgctgggtcagcaggcgcttcctgccgacgccgcccgcctggtcggggcgaagctggatctcgacgaagactccattctactgttgcagatgattccactgcgtggctgcattgatgaccgtattccaactgacccaacgatgtatcgtttctatgaaatgttgcaggtgtacggtacaaccctgaaagcgttggttcatgagaaatttggcgatggcattattagcgcgattaacttcaaactcgacgttaagaaagtggcggacccggaaggtggcgaacgtgcggtcatcaccttagatggtaaacatctgccgaccaaaccgttctgacagccatgcgcaaccatcaaaagacgttcacgatgctgctggtactggtgctgattggtcttaatatgcgaccactgctcacctccgtcgggccactgctaccgcaattgcgccaggcgagcggaatgagctttagcgtggctgccctgttgaccgctctgccggtggttaccatgggcgggctggcgctggccggaagctggcttcatcagcatgtcagcgaacgtcgcagtgtcgccatcagtctgttgctgattgccgtcggtgcattgatgcgtgagctttacccgcaaagtgcgctgctgcttagcagcgcactgcttggtggggtggggatcggcatcattcaggcggtgatgcctagcgtgattaaacggcggtttcagcagcgcacgccactggtgatggggctgtggtccgcggctctgatgggcggcggtgggcttggtgccgccataacgccctggttagttcaacatagcgaaacctggtatcaaacactcgcctggtgggcgctgcctgccgttgttgcgctctttgcctggtggtggcaaagcgcccgcgaggtcgcctcttcccacaagacaacaaccactccggttcgcgtggtattcactccccgcgcgtggacgctgggtgtttacttcggtctgattaacggcggttacgccagcctgattgcctggttacccgctttctatattgagattggtgccagcgcgcagtacagcggttccttactggcattgatgacgcttgggcaagccgcaggagctttgctgatgcctgctatggctcgccatcaggatcggcgcaaactgttaatgctggcgctggtgttacaactggtggggttctgcggctttatctggctgccgatgcaattgccggtattgtgggcgatggtgtgtgggttaggtctgggcggcgcgtttccgctctgtttgctgctggcgctcgatcactctgtgcaaccggctattgctggcaagctggtggcgtttatgcagggaatcggttttatcatcgccgggcttgccccgtggttttctggcgtgctgcgtagtatcagcggcaattacctgatggactgggcatttcatgcgctgtgcgtcgttgggctgatgatcataaccctgcgttttgcaccagtacgttttccgcagctgtgggtcaaagaggcatgatgcgacgcttgttcctgcgctttgttcatgccggatgcggctaatgtagatcgctgaacttgtaggcctgataagcgcagcgtatcaggcaatttttataatttaaacactgctttcaactttataatctttgaaataatagtgcttatcccggtcgtttatttcgcgaataacccgacaaggaacgccagccgccacgacgtttggtggaatgtcttttgtgacgatactacccgcgccaataacagaattatccccgatggtgacgcctggattaataaccacatgacttccgatccagacgttattgccaatcgttatcggaaaagagtacatctcgccgttttttctcaattcatggtgtacagggtgtcccgtaacggaaagagtaacgttgggtgcaatcagtacgttatcaccgattgttaccgtgtagtcatcgacaatggttaaattgaaatttgcataaaaattgcggcctatatggatgttggaaccgtaagagaaatagacaggcggttctacccaggcgttttcccctaccgtggcaaacatttctttaatcaggctttctcttttttcaacttcacttggatggctgtgattaaactcatacattaacgttttcccacgaagtcttttttccggtaagccttcgcacatatcggtaaatagcttgcctgctcttattctttcggtcattggcatgttcaatgcgatcactccgttatgatatgttggtcggataaggcgctcgcgccgcatccgacattgattgcttaagcgacttcattcacctgacgacgcagcagggaaagcgggccggggccgctaagcgtgaacacggaaattaaggtgaagcccagcgccaccagacccagcaccagataagcgccctggaaaccgatgctttcatacatattgcccgccagtacagacataaaaatcatcgccagttgcttaaagaagcagaaacagaccagataaatcgtcgcactaaaacgcacttcaaactggctggtaatatatttaaagcagcccaccagcaggaacggtacttcaaacatatgcagcgttttcagaataaccacttccagcgcactggtggcgaagctactgccaataatacgtacagacataatagtgccagccagcagcagggcgtttttcccaccgatgcgattaatgatcagtggcgcaaagaacataatgctggcgttaagtaattcgcccattgtcgttacgtagccaaatacccgcgtaccctgttcaccggtagcaaagaagctagtaaagaaattagcaaactgttggtcaaaaacatcgtaggtgcaggaaacgccaataacatacagactcaaaaaccacagttttggctgtctgaacagttccagtgccagcttaaggctaaatgcgctatggttggcacctaccgcattggcaaccgtggcagaagagggcgcatccgttttggcgaaaaagagtaaaacggcgaggatgagtgcacagccagagcccagccagaaaacaaactgattattgatggtgaacatgatgccgacaatgctggcacacagcgcccagccaacacagccaaacatccgcgcgcgaccaaattcgaaattactgcgacggctgactttctcaataaatgcctctactgctggcgcaccggcgttaaaacaaaagcctagataaataccaccaacaatgcttcctactaaaatgttgtattgtaacagtggcccgaagataaaaataaagaacggcgcaaacatcactaacatgccggtaataatccacagcaggtatttgcgcagcccgagtttgtcagaaagcagaccaaacagcggttggaataataggctgaacagagaaatagcggcaaaaataatacccgtatcacttttgctgatatggttgatgtcatgtagccaaatcgggaaaaacgggaagtaggctcccatgataaaaaagtaaaagaaaaagaataaaccgaacatccaaaagtttgtgttttttaaatagtacataatggatttccttacgcgaaatacgggcagacatggcctgcccggttattattatttttgacaccagaccaactggtaatggtagcgaccggcgctcagctggaattccgcgcttacactcgggctccaggagtcgtcgccaccaatccccatatggaaaccgtcgatattcagccatgtgccttcttccgcgtgcagcagatggcgatggctggtttccatcagttgctgttgactgtagcggctgatgttgaactggaagtcgccgcgccactggtgtgggccataattcaattcgcgcgtcccgcagcgcagaccgttttcgctcgggaagacgtacggggtatacatgtcactcaatggcagatcccagcggtcaaaacaggcggcagtaaggcggtcgggatagttttcttgcggccctaatccgagccagtttacccgctctgctacctgcgccagctggcagttcaggccaatccgcgccggatgcggtgtatcgctcgccacttcaacatcaacggtaatcgccatttgaccactaccatcaatccggtaggttttccggctgataaataaggttttcccctgatgctgccacgcgtgagcggtcgtaatcagcaccgcatcagcaagtgtatctgccgtgcactgcaacaacgctgcttcggcctggtaatggcccgccgccttccagcgttcgacccaggcgttagggtcaatgcgggtcgcttcacttacgccaatgtcgttatccagcggtgcacgggtgaactgatcgcgcagcggcgtcagcagttgttttttatcgccaatccacatctgactaagaaagccactctggcggttaaattgccaacgcttattacccagctcgatgcaaaaatccatttcgctggtggtcagatgcgggatggcgtgggacgcggcggggagcgtcacactgaggttttccgccagacgccactgctgccaggcgctgatgtgcccggcttcactccatgcggtcgcgttcggttgcactacgcgtactgtgagccagagttgcccggcgctctccggctgcggtagttcaggcagttcaatcaactgtttaccttgtggagcgacatccagaggcacttcaccgcttgccagcggcttaccatccagcgccaccatccagtgcaggagctcgttatcgctatgacggaacaggtattcgctggtcacttcgatggtttgcccggataaacggaactggaaaaactgctgctggtgttttgcttccgtcagcgctggatgcggcgtgcggtcggcaaagaccagaccgttcatacagaactggcgatcgttcggcgtatcgccaaaatcaccgccgtaagcgctccacgggttgccgttttcatcatatttaatcaggctctgatccacccagtcccagacgaagccgccctgtaaacggggatactgacgaaacgcctgccagtatttagcgaaaccgccaagactgttacccatcgcgtgggcgtattcgcaaaggatcagcgggcgcgtctctccaggtaggctaagccattttttgatggaccatttcggcacagccgggaagggctggtcttcatccacgcgcgcgtacatcgggcaaataatatcggtggccgtggtgtcggctccgccgccttcatactgcaccgggcgggaaggatcgacagatttgatccagcgatacagcgcgtcgtgattagcgccgtggccactttcattccccaggctccagatgatcacactcgggtgattacgatcgcgctgcaccattcgcgttacgcgttcgctcatcgccggtagccagcgcggatcatcggtcagacgattcattggcaccatgccgtgggtttcaatattggcttcatccaccacatacaggccgtagcggtcgcacagcgtgtaccacagcggatggttcggataatggctacagcgcacggcgttaaagttgttctgcttcatcagcaggatatcctgcaccatcgtctgctcatccatgacctgaccatgcagaggatgatgctcgtgacggttaacgcctcgaatcagcaacggcttgccgttcagcagcagcagaccattttcaatccgcacctcgcggaaaccgacatcgcaggcttctgcttcaatcagcgtgccgtcggcggtgtgcagttcaaccaccgcacgatagagattcgggatttcggcgctccacagtttcgggttttcgacgttcagacgtagtgtgacgcgatcggcataaccaccacgctcatcgataatttcaccgccgaaaggcgcggtgccgctggcgacctgcgtttcaccctgccataaagaaactgttacccgtaggtagtcacgcaactcgccgcacatctgaacttcagcctccagtacagcgcggctgaaatcatcattaaagcgagtggcaacatggaaatcgctgatttgtgtagtcggtttatgcagcaagctgacgtcacggaaaatgccgctcatccgccacatatcctgatcttccagataactgccgtcactccagcgcagcaccatcaccgcgaggcggttttctccggcgcgtaaaaatgcgctcaggtcaaattcagacggcaaacgactgtcctggccgtaaccgacccagcgcccgttgcaccacagatgaaacgcgctgttaacgccatcaaaaataattcgcgtctggccttcctgtagccagctttcatcaacattaaatgtgaggctgtaacaacccgtcggattctccgtgggaacaaacggcggattgaccgtaatgggataggtcacgttggtgtagatgggcgcatcgtaaccgtgcatctgccagttactggggacgacgacagtatcggcctcaggaagatcgcactccagccagctttccggcaccgcttctggtgccggaaaccaggcaaagcgccattcgccattcaggctgcgcaactgttgggaagggcgatcggtgcgggcctcttcgctattacgccagctggcgaaagggggatgtgctgcaaggcgattaagttgggtaacgccagggttttcccagtcacgacgttgtaaaacgacggccagactatccgtaatcatggtcatagctgtttcctgtgtgaaattgttatccgctcacaattccacacaacatacgagccggaagcataaagtgtaaagcctggggtgcctaatgagtgagctaactcacattaattgcgttgcgctcactgcccgctttccagtcgggaaacctgtcgtgccagctgcattaaactatcggccaacgcgcggggagaggcggtttgcgtattgggcgccagggtggtttttcttttcaccagactgacgggcaacagctgattgcccttcaccgcctggccctgagagagttgcagcaagcggtccacgctggtttgccccagcaggcgaaaatcctgtttgatggtggttaacggcgggatataacaactgctgtcttcggtatcgtcgtatcccactacgctgatatccgcaccaacgcgcagcccggactcggtaatggcgcgcattgcgcccagcgccatctgatcgttggcaaccagcatcgcagtgggaacgatgccctcattcagcatttgcatggtttgttgaaaaccggacatggcactccagtcgccttcccgttccgctatcggctgaatttgattgcgagtgagatatttatgccagccagccagacgcagacgcgcgctgacagaacttaatgggcccgctaacagcgcgatttgctggtgacccaatgcgaccagatgctccacgcccagtcgcgtaccgtcttcatgggagaaaataatactgttgatgggtgtctggtcagagacatcaagaaataacgccggaacattagtgcaggcagcttccacagcaatggcatcctggtcatccagcggatagttaatgatcagcccactgacgcgttgcgcgagaagattgtgcaccgccgctttacaggcttcgacgccgcttcgttctaccatgctcaccaccacgctggcacccagttgatcggcgcgagatttaatcgccgcgacaatttggctcggcgcgtgcagggccagactggaggtggcaacgccaatcagcaagctctgtttgcccgccagttgttgtgccacgcggttgggaatgtaattcagctccgccatcgccgcttccactttttcccgcgttttcgcagaaacgtggctggcctggttcaccacgcgggaaacggtctgataagagacaccggcatactctgcgacatcgtataacgttactggtttcacattcaccaccctgaattgactctcttccgggcgctatcatgccataccgcgaaaggttttgcgccattcgatggtgtcaacgtaaatgcatgccgcttcgccttccggccaccagaatagcctggctttcaaccccttcttcgatctgttttgctacccgttgtagcgccggaagatgcttttccgctgcctgttcaatggtcattgcgctcgccatatacaccagattcagacagccaatcacccgttgttcactgcgcagcggtacggcgatagaggcgatcttctcctcctgatcccagccgcggtagttctgtccgtaaccctctttgcgcgcgcgcgccagaatggcttccagctttaacggttcccgtgccagttgatagtcatcaccggggcgggaggctaacatttcgattaattccttgcggtcttgttccgggcaaaaggccagccaggtcaggccgctggcggttttcagaagcggcaaacgtcgcccgaccattgcccggtgaaaggataagcggctgaaacggtgagtggtttcgcgtaccaccattgcatcaacatccagcgtggacacatctgtcggccataccacttcgcgcaacagatcgcccagcagtggggccgccagtgcagaaatccactgttcgtcacgaaatccttcgcttaattgccgcactttgatggtcagtcgaaaactatcatcggaggggctacggcggacatatccctcttcctgcagcgtctccagcagtcgccgcacagtggtgcgatgcaggccgctgagttccgccagcagcccgacgctggcaccgccatcaagtttatttaacatatttaataacattagaccgcgggttaagccgcgcacggttttgtattccgtctgctcattgttctgcatattaatactcatttctatagttaaaacaacgtggtgcacctggtgcacattcgggcatgttttgattgtagcgctaaacacccttcctatactgagcgcacaataaaaaatcatttacatgtttttaacaaaataagttgcgctgtactgtgcgcgcaacgacattttgtccgagtcgtgaggtactgaaatggcaatacaacaccctgacatccagcctgctgttaaccatagcgttcaggtggcgatcgctggtgccggcccggttgggctgatgatggcgaactatctcggccagatgggcattgacgtgctggtggtggagaaactcgataagttgatcgactacccgcgtgcgattggtattgatgacgaggcgctgcgcaccatgcagagcgtcggcctggtcgatgatgttctgccgcacactacgccgtggcacgcgatgcgttttctcaccccgaaaggccgctgttttgctgatattcagccaatgaccgatgaatttggctggccgcgccgtaacgcctttattcagccgcaggtcgatgcggtgatgctggaaggggtgagccgttttccgaatgtgcgctgcttgttttcccgcgagctggaggccttcagtcagcaagatgacgaagtgaccttgcacctgaaaacggcagaagggcagcgggaaatagtcaaagcccagtggctggtagcctgtgacggtggagcaagttttgtccgtcgcactctgaatgtgccgtttgaaggtaaaactgcgccaaatcagtggattgtggtagatatcgccaacgatccgttaagtacgccgcatatctatttgtgttgcgatccggtgcgcccgtatgtttctgccgcgctgcctcatgcggtacgtcgctttgaatttatggtgatgccgggagaaaccgaagagcagctgcgtgagccgcaaaatatgcgcaagctgttaagcaaagtgctgcctaatccggacaatgttgaattgattcgccagcgtgtctacacccacaacgcgcgactggcgcaacgtttccgtattgatcgcgtactgctggcgggcgatgccgcgcacatcatgccggtatggcaggggcagggctataacagtggtatgcgcgacgcctttaacctcgcatggaaactggcgttggttatccaggggaaagcccgcgatgcgctgctcgatacctatcaacaagaacgtcgcgatcacgccaaagcgatgattgacctgtccgtgacggcgggcaacgtgctggctccgccgaaacgctggcagggtacgttacgtgacggcgtttcctggctgttgaattatctgccgccagtaaaacgctacttcctcgaaatgcgcttcaagccgatgccgcaatattacggcggtgcgctgatgcgtgagggcgaagcgaagcactctccggtcggcaagatgtttattcagccgaaagtcacgctggaaaacggcgacgtgacgctgctcgataacgcgatcggcgcgaacttcgcggtaattggctggggatgcaatccactgtgggggatgagcgacgagcaaatccagcagtggcgcgcgttgggcacacgcttcattcaggtggtgccggaagtgcaaattcataccgcacaggataaccacgacggcgtactacgcgtgggcgatacgcaaggtcgcctgcgtagctggttcgcgcaacacaatgctagcctggtggtgatgcgcccggatcgctttgttgccgccaccgccattccgcaaaccctgggcaagaccctgaataaactggcgagcgtgatgacgctgacccgccctgatgccgacgtttctgtcgaaaaggtagcctgatatgcacgcttatcttcactgtctttcccacagcccgctggtggggtatgtcgacccggcgcaagaggtgctcgatgaggtcaatggcgtgattgccagcgcccgcgagcgtattgcggcattctcccctgaactggtggtgctgtttgcgccagatcactacaacggctttttctatgacgtgatgccaccgttctgtttaggcgttggagcgacggcaattggtgatttcggcagtgcggcaggagagctgcccgtgcctgtggagctggcggaggcctgtgcgcatgccgtcatgaagagcgggatcgatcttgccgtttcttactgtatgcaggtggaccacgggttcgcccagccgctggagttcctgctcggtgggctggataaggtgccagttctgcctgtgttcatcaacggtgtcgccacgccgctgcccggtttccagcgtacccgcatgttgggtgaagccattggacgtttcaccagcactctcaataaacgcgtgctgttcctgggttccggtgggctttcccatcagccgccggtgcccgaactggcgaaagccgatgcccatatgcgcgaccgtctgttggggagcgggaaagatttacccgccagtgagcgcgaattgcgtcagcaacgggtgattagcgccgctgagaagtttgttgaggatcagagaacgctgcatccgctcaacccgatttgggataaccagttcatgactttgctggagcagggacgcatacaggaactggatgccgtcagtaacgaagagctttccgccattgccggaaagagcacacatgaaatcaaaacctgggtcgccgcttttgccgctatttctgcgtttggcaactggcgtagcgaagggcgttattaccgcccaatcccggagtggattgccggatttggcagcttaagcgccagaacagagaactgaatatgcaggagaagatgatgagttatcagccacaaaccgaagccgccaccagccgttttctgaatgtagaagaagcgggtaaaacgctgcgcatccattttaatgactgcggacaaggcgacgaaaccgttgtcctgctgcatggttccggcccgggtgctactggctgggcgaacttcagccgcaatatcgatccgctggtagaggcgggctatcgggtgatcctgctggattgtccgggttggggcaagagcgatagcgtcgttaatagtggtagccgaagcgatcttaatgcacgaatcctgaaaagcgtggtggatcaactggatatcgccaaaatccacctgctgggcaacagcatggggggccatagttctgtggcgttcacccttaaatggccggagcgcgtcggcaaactggtgctgatgggcggcggtacgggcggcatgagtttgtttacgccgatgccaaccgaaggtattaagcgactgaatcagctttatcgtcagccgactatcgaaaacctgaagctgatgatggatatcttcgtttttgataccagcgatttgaccgacgccctgtttgaagcgcgcctgaataatatgctgagccgccgcgatcacctggaaaacttcgttaagagcctggaagctaatccgaaacagttcccggattttggcccacgtctggcggaaatcaaagcgcaaaccctgattgtctgggggcgcaacgaccgctttgtgccgatggatgcgggtctgcgtctgctgtccggcattgccggttctgaactgcatatcttccgcgactgtggtcactgggcgcagtgggaacatgccgacgctttcaatcaactggtgctgaatttcctcgcacgcccttaaggaatggtcatgacgaagcatactcttgagcaactggcggcggatttacgccgcgccgcagagcagggcgaagcgattgcaccgctgcgcgatctgattggtatcgataacgctgaagcggcttacgccattcagcacataaatgtgcaacatgacgttgcgcaggggcgtcgcgtggtagggcgtaaagtgggcctgacacatccgaaagtgcaacaacaactgggcgttgatcaaccggattttgggacgttatttgccgacatgtgttatggcgataacgaaatcattcctttttcccgtgttctgcaaccccgcattgaagcggagatcgcactggtgttgaaccgcgatttgcccgcaaccgatatcaccttcgacgaattgtataacgccattgaatgggtacttccggcgctggaagtggtggggagccgcattcgcgactggagcattcagtttgtcgataccgtggcagataacgcctcctgtggggtgtatgtcatcggcggtccggcgcaacgtccggcggggttagacctgaaaaactgcgccatgaagatgacgcgtaataacgaagaggtttctagcgggcgcggcagcgaatgcctgggacatccgcttaatgcggccgtctggctggcacgcaaaatggccagtctgggtgaaccgctgcgcaccggagatatcattcttaccggggcattaggtccgatggtggcggtgaatgcgggcgatcgttttgaagcccatattgaaggcataggtagtgttgctgcgacatttagtagcgcagccccaaaaggaagtctgagttgagctaagccccaaaaggaagtctgtcatgagtaagcgtaaagtcgccattatcggttctggcaacattggtaccgatctgatgattaaaattttgcgtcacggtcagcatctggagatggcggtgatggttggcattgatcctcagtccgacggtctggcgcgcgccagacgtatgggcgtcgccaccacccatgaaggggtgatcggactgatgaacatgcctgaatttgctgatatcgacattgtatttgatgcgaccagcgccggtgctcatgtgaaaaacgatgccgctttacgcgaagcgaaaccggatattcgcttaattgacctgacgcctgctgccatcggcccttactgcgtgccggtggttaacctcgaggcgaacgtcgatcaactgaacgtcaacatggtcacctgcggcggccaggccaccattccaatggtggcggcagttagtcgcgtggcgcgtgttcattacgccgaaattatcgcttctatcgccagtaaatctgccggacctggcacgcgtgccaatatcgatgaatttacggaaaccacttcccgagccattgaagtggtgggcggcgcggcaaaagggaaggcgattattgtgcttaacccagcagagccaccgttgatgatgcgtgacacggtgtatgtattgagcgacgaagctagtcaagatgatatcgaagccagtatcaatgaaatggctgaggcggtgcaggcttacgtaccgggttatcgcctgaaacagcgcgtgcagtttgaagttatcccgcaggataaaccggtcaatttaccgggcgtggggcaattctccggactgaaaacagcggtctggctggaagtcgaaggcgcagcgcattatctgcctgcctatgcgggcaacctcgacattatgacttccagtgcgctggcgacagcggaaaaaatggcccagagtctggcgcgcaaggcaggagaagcggcatgaacggtaaaaaactttatatcagcgacgtcacattgcgtgacggtatgcacgccattcgtcatcagtatagcctggaaaacgttcgccagattgccaaagcactggacgatgcccgcgtggatagcattgaagtggcccacggcgacggtttgcaaggttccagctttaactatggtttcggcgcacatagcgaccttgaatggattgaagcggcggcggatgtggtgaagcacgccaaaatcgcgacgttgttgctgccaggaatcggcactattcacgatctgaaaaatgcctggcaggctggcgcgcgggtggttcgtgtggcaacgcactgtaccgaagctgatgtttccgcccagcatattcagtatgcccgcgagctcggaatggacaccgttggttttctgatgatgagccatatgaccacgccggagaatctcgccaagcaggcaaagctgatggaaggctacggtgcgacctgtatttatgtggtggattctggcggtgcgatgaacatgagcgatatccgtgaccgtttccgcgccctgaaagcagagctgaaaccagaaacgcaaactggcatgcacgctcaccataacctgagtcttggcgtggcgaactctatcgcggcggtggaagagggctgcgaccgaatcgacgccagcctcgcgggaatgggcgcgggcgcaggtaacgcaccgctggaagtgtttattgccgccgcggataaactgggctggcagcatgggaccgatctctatgcgttaatggatgccgccgacgacctggtgcgtccgttgcaggatcgaccggtacgagtcgatcgcgaaacgctggcgctgggatacgctggtgtttacagcagcttcctgcgtcactgtgaaacggcggcggcgcgttatggcttaagtgcggtggatattctcgttgagctgggcaaacgccggatggttggcggccaggaggatatgatcgttgacgtggcgctggatctgcgcaacaacaaataatgatgactgccgagaacgtgcattttgtatgcccatcccagcacgactgccggatgcggcgtgaacgccttatccggcctacggatggcgtgagaatttgtaggtctgataagacgcgttagcgtcgcatcaggcatctgcgcacgactgccggatgcggcgtgaacgccttatccggcctacggatggcgcgggaatttgtaggcctgataagacgcgttagcgtcgcatcaggcatctgcgcacgactgccggatgcggcgtgaacgccttatccggcctacgggtggcgcgagaatttgtaggcctgataagacgcgttagcgtcgcatcaggcatctgcgcacgactgccggatgcggcgtaaacgccttatccggcctacggatggcgcgggaatttgtaggcctgataagacgcgttagcgtcgcatcaggcatctgcacacgactgccggatgcgataaacgtcttgtccggcctacatttcgcccgtaggcagtcattaaatagttctgattacgcggctggcaatgtatcagtcgcgattcacctgcactcgcaacgaggttcatcttatgagcactcgtacccctagtagttctagttcccgcctgatgctgaccatcgggctttgttttttggtcgctctgatggaagggctggatcttcaggcggctggcattgcggcgggtggcatcgcccaggctttcgcactcgataaaatgcaaatgggctggatatttagcgccggaatactcggtttgctacccggcgcgttggttggcggaatgctggcggaccgttatggtcgcaagcgcattttgattggcagtgttgcgctgtttggtttgttcagtctggcaacggcgattgcctgggatttccccagtctggtctttgcgcggctgatgaccggtgtcgggctgggggcggcgttgccgaatcttatcgccctgacgtctgaagccgcgggtccacgttttcgtgggacggcagtgagcctgatgtattgcggtgttcccattggcgcggcgctggcggcgacactgggtttcgcgggggcaaacttagcatggcaaacggtgttttgggtaggtggtgtggtgccgttgattctggtgccgctattaatgcgctggctgccggagagcgcggttttcgctggcgaaaaacagtctgcgccaccactgcgtgccttatttgcgccagaaacggcaaccgcgacgctgctgctgtggttgtgttatttcttcactctgctggtggtctacatgttgatcaactggctaccgctacttttggtggagcaaggattccagccaagccaggcggcaggggtgatgtttgccctgcaaatgggggcggcaagcgggacgttaatgttgggcgcattgatggataagctgcgtccagtaaccatgagcctactgatttatagcggcatgttagctagcctgctggcgcttggaacggtgagcagttttaacggtatgttgctggcgggatttgtcgcggggttgtttgcgacaggtgggcaaagcgttttgtatgccctggcaccgttgttttacagtagccagatccgcgcaacaggtgtgggaacagccgtggcggtagggcgtctgggggctatgagcggtccgttactggccgggaaaatgctggcattaggcactggcacggtcggcgtaatggccgcttctgcaccgggtattcttgttgctgggttggcggtgtttattttgatgagccggagaagtcgaatacagccgtgcgccgatgcctgacgtgccttattaggcaggggcgaaagggacttcaccccaatacacctacggcgtttacaggtatactcgctaaaaattattcagcgggtttggaaacaaagatggcaaaacttaccttacaagagcagttgctcaaagcaggattagtcaccagcaaaaaagcggcgaaggtggagagaacggcgaaaaaaagccgcgttcaggcgcgtgaagctcgggcggcggtagaagaaaataaaaaggcacagcttgagcgtgataaacagcttagcgaacagcaaaaacaagcggcgttggcgaaagaatataaagctcaggtgaagcagcttattgaaatgaaccgaatcaccattgccaatggcgatattggttttaacttcactgacggcaatctgattaagaagatttttgtcgataagctcacacaggcgcagttgattaatggtcgtctggcgattgcccgcttgttggtcgataacaatagcgaaggtgaatacgccattattcccgccagcgttgccgataaaattgctcagcgcgatgccagcagtatagcgttgcacagcgcgctcagcgccgaagagcaggatgaagacgacccgtatgccgacttcaaagtgcctgatgatttgatgtggtaaacatagataagtcgtgcgcagatgcctgatgcgacgctatgcgcgtcttatcaggcctacggtttatgggcgaagtgtagaccggataaggcgttcacgccgcatccggcagtcgtgcgccatgcctgatgcgacgctttgcgcgtcttatcaggcctacggcttacgggcgaagtgtaggccggataaggcgttcacgccgcatccggcagtcgtgctattatcaacgcatattcagtttattggcgtggtaggcaatatgctcgccaataaaactggagacaaaataatagctgtgatcataaccctcgtgataacggattaacgtcttgatattcatctcctggcagatcttttcaagatttggagtccgcagctgttctgcgtaaaaatcatcactcaacccctgatcaaccatgatttccgcaacgcgttgaccttgactaataagactcaccgggtcgtaatccaaccaggcatctttattttcagcaagatatgcagcaaaggcttgctgtccccacggcacttggcttggggagacaatggggctaaacgcgctgacgctgacatattcatctgggttacgtaacgccagcaccagcgcgcccagcccgcccatagaatgaccagagatagactttttggccgttgccggaaaatgatgcatcactaaatccggcagctcgttgcggatatagtcatacattttgtaatgttcattccacggcgcttgcgtcgcgttcaggtaaaacccggcaccttgcccgagatcgtaacggtcagcatctgcgacatgactgcctcgcggactggtgtccggcgcaacaacaataatgttgtgctcagccgcgtaacgctgcatcccgcttttagtaatgaaattctgctcgttgcaggtcaggccactaagccagtacagcaccggcaatttttcattcgcggcttttggtgggagatagacgccgacattcatttcacatttcagactttgggaataatgccgatacatattttgccagccgccaaagctgacatgtttttcaatgagttccatcagtcattatctcagggttaatcccccggacggctgcccggggagagtattaagaacccccgcctgaagtggacggggtaaacctgcgggaaatcagtaacgaattacggttcgaatggatttgccttcatgcatcaggtcgaaggcgtcattaatttcatccaggctcatggtatgcgtgacaaacggttccagatcgatatcacctttcatcgcatcttcaaccatgcccggtaactgggaacgacctttcacgccgccaaacgcggaacctttccatacgcgaccagtgaccaactggaatggacgggtggagatttcctgaccggcaaccgcgaccccgatgatcacgctctgaccccagccgcggtgcgcactttccagcgccgcacgcatcacgttgacgttaccgatgcattcaaaggtatggtcgataccccatttgttgatatccaacaggacatcttttatcggtttgtcgtagtcattcgggttaatgcagtcggtagcaccgaagcgacgcgccagatcgaatttcttcgggttggtatcgatagcgataatccgacccgctttcgcctgacgcgcgccctgaaccactgccagaccaatcgcgccaagaccaaacacggcaacagaatcacctggctggactttagctgtgttgtgtaccgcgccaataccggtggtcacgccacagcccagcaggcagacgtgttcatggtttgcttctggattaatttttgccagagacacttccgcgactacggtgtattcactgaatgtagagcaccccatgtagtgataaagcggctgcccgttgtaagaaaaacgggtggtgccgtctggcatcaggcctttaccctgggtttcgcgaaccgcaacacagaggttagttttgccagaacgacagaactcacactcgccgcactccgcggtgtaaagcgggatcacatggtcgccaggtttgacgctggttacgccttcaccgacttcaaccacaacgccggccccttcgtgaccgagaaccaccgggaatacaccttccgggtcatcgccggagagggtaaatgcgtcggtatggcaaacgccggtatgggtgactttaattagcacttcaccttttttcggtggtgcaacgtcaatttcaacgatttccagcggtttaccgggagcaaatgcaacggcagcacgacttttcatctctcgctcttcctcaatatggtaatagattcagttatttaagataggcacgaaccagttcaatagtgtcgtcaacggattggctgacttcgcggctgtagcagtcatttcggtcaaacgtttcccggatatggctttcaagcacttctgccatcagcccattagccgcgccccgaacggcagcgatctgttggagtatggcacggcattcggcatcaccctccaggctccgttccagagcatcaatctgcccccgaatacgacgaactcgagtaaggacctttttcttctcttccggagtactgggcatttcgcacctcatcatctgcatgcaatatactataggggggtattctatatgtcaatgcatacccccctatagtatataacactggagaataaaatttatccggtgaatgtggtcggaaaacaaagaggaaaggggggggctaatcggcagggaaggccgccccggatagcgggcggcagaaggaatcagaatttccaggtcagacgggctgcaagttgcagaccgttacgagatggacggtcccctcgcccccttggggagagggttagggtgagggggcgttcaccgtactttcaacaggttaactccccctttctgagaggaaacaaaattaacgcagaatcttcttctcagccaaatccagcgcaaagtagctgaaaatcagatccgcacccgcacgcttaatgctacctaagctttcgagcacgactttctcttcatctatagcacccgccagcgcggcgaacttaatcatcgcatactcaccgctcacctgatacgcgccaatcggcaattcagtacgttcacgcagctcacgcacgatgtcgaggtacgctccagcaggtttaaccatcaggcagtctgcgccctgggcttcatccagcagactttcacgaatcgcctcacgacggttcattgggttcatctgatagcttttgcggtcgccttttaatgcgcttccggcagcttcacggaacgggccataaaaggaggaggcgaacttggtgctatagctcataatcgccgtatctttaaatcccgcagcgtccagcgcctgacgaatcgcctgtacctggccgtccatcgcggcggaaggggcgatgaagtctgcacctgcagcagctgcaaccacggcttgcttgcctaaattttccagagtcgcgtcgttgtcgacgccatgctcgcacagcacaccgcagtgaccgtgagaagtgtattcacagaagcaggtgtcactcataacgatcatttctggcacggtctgcttgcagatgcggctcatacgcgccaccagtccatcttcccgccaggcatcgctgccggtttcatcggtatggtgagagatgccaaaagtcatcacggaacgaataccggcgttggcgatgcgttcaatttcgcgtgccagatgtttctctggaatgcgcatcacgcctggcatggcttcaacggctttgtagtcgtcaatttcttcttcaacaaagatcggcaacaccaggtcgttaaggctaagtgttgtctcttcaaacatagcgcgcagcgcaggagatttgcgcaggcgacgagggcgttggattaagtctgtcatggtctgcctgatgtttgtggaatcgaggggcatagtatacctgaagcagggtagggatgttttacgaaagttgtcgcgatgttgacaagaagagaatggaagagaggccaggacatctttttaatagaaacagcaataattttatattcactgaaaatatttttaatcttgaatattatcgggcgttaaaatattacattgtggttttcaatgcgttatccgcagcgtgacgctccagcgccagttcaatcaaacgtgtgatcagatcggtgtaacccagaccgctggcttgccacagcttcggatacatactgatattagtgaagccaggcagggtgttgatctcgttgatcaccacttcgttctctggggttaaaaacacgtctacacgcgccatgcctgcgcatcccaacgtttgataagcctgaacggcaatcgcccggatcttatcgttgatttctggcgcaatggctgccggaactaccactttcgcgccatcttcgtcaatgtacttggtgtcgtaggcatagaaatcgctggtgagtacgatctctccacaggtgctggcttgcggattgtcgttgcccagaactgcgcattcgatctcacgacctttgatcccttgctcaacgatcactttatgatcgaactcgaacgccagatcgacggcaattgcgtactgttcttcactggttactttgctgacaccaacagaagagccctgattagccggttttacaaacagtggtaaccccagtttagactccacttcggcaaaactaatgttgtgacgattggcgcgcgtcagggtaataaatggcgcaatgttcagcccggcatcgcgtagcagacgtttggtgacatctttgtccatacaggctgcactagccagaacatcagaacctacaaacggtaaattggcgacccgcagcattccctgcaaggaaccatcttcgcccagcgtaccgtggacaatcgggaaaatgacatccaccgtcggcaacggctgaccgttttgcgcgtcgataagctgatgctcatgtttacctggcacctgcgcaaggctggtcgcgctagggcgcaacgcaatatgggcaggatcgtctgcatttagcagataattgctggcatcgctgacgtgccattgcccttgtttatcaatgcccagcagcacaacgtcgaagcgacttttatcaatggcatcgacaatgttttttgcgctttgcagagacacttcatgttccgcacttttaccaccaaaaacgattcctacccgcagtttttccatcttaaaaacctatcccgtctaacacaaagtgcatacattaccacgacaaaacgggggattcgcggccttctgaaagattgttgcaatcttctgctgacaaagcgtgcaacgtactggtgaagaaagtgcgttatctcaaagatgtgcgcaagatcacaaaaatgatgaacgggaagctaatttattcctggcttaaatggccatgcggtgagtttttttctcttaattataagttaacgaagagaatatatttcataacttttatttataataaaggttgataattaaaagcctatattttgtgtgggtaattatttaaataagagaaacgtttcgctggtaatcaaacaaaaaatatttgcgcaaagtatttcctttgtcataaaaataatacttccagacactatgaagttgtgaaacataatgttaacttctccatactttggataaggaaatacagacatgaaaaatctcattgctgagttgttatttaagcttgcccaaaaagaagaagagagcaaagaactgtgtgcgcaggtagaagctttggagattatcgtcactgcaatgcttcgcaatatggcgcaaaatgaccaacagcggttgattgatcaggtagagggggcgctgtacgaggtaaagcccgatgccagcattcctgacgacgatacggagctgctgcgcgattacgtaaagaagttattgaagcatcctcgtcagtaaaaagttaatcttttcaacagctgtcataaagttgtcacggccgagacttatagtcgctttgtttttattttttaatgtatttgtacatggagaaaataaagtgaaacaaagcactattgcactggcactcttaccgttactgtttacccctgtgacaaaagcccggacaccagaaatgcctgttctggaaaaccgggctgctcagggcgatattactgcacccggcggtgctcgccgtttaacgggtgatcagactgccgctctgcgtgattctcttagcgataaacctgcaaaaaatattattttgctgattggcgatgggatgggggacagcgaaattactgccgcacgtaattatgccgaaggtgcgggcggcttttttaaaggtatagatgccttaccgcttaccgggcaatacactcactatgcgctgaataaaaaaaccggcaaaccggactacgtcaccgacagcgctgcaagtgcaaccgcctggagtaccggtgtcaaaacctataacggcgcgctgggcgtcgatattcacgaaaaagatcacccaacgattctggaaatggcaaaagccgcaggtctggcgaccggtaacgtttctaccgcagagttgcaggatgccacgcccgctgcgctggtggcacatgtgaccagccgcaaatgctacggtccgagcgcgaccagtgaaaaatgtccgggtaacgctctggaaaaaggcggaaaaggaagcattaccgaacagctgcttaacgctcgtgccgacgttacgcttggcggcggcgcaaaaacctttgctgaaacggcaaccgctggtgaatggcagggaaaaacgctgcgtgaacaggcacaggcgcgtggttatcagttggtgagcgatgctgccagtctgaatagcgtgacggaagcgaatcagcaaaaacccctgcttggcctgtttgctgacggcaatatgccagtgcgctggctaggaccgaaagcaacgtaccatggcaatatcgataagcccgcagtcacctgtacgccaaatccgcaacgtaatgacagtgtaccaaccctggcgcagatgaccgacaaagccattgaattgttgagtaaaaatgagaaaggctttttcctgcaagttgaaggtgcgagtatcgataaacaggatcatgctgcgaatccttgtgggcaaattggcgagacggtcgatctcgatgaagccgtacaacgggcgctggaattcgctaaaaaggagggtaacacgctggtcatagtcaccgctgatcacgcccacgccagccagattgttgcgccggataccaaagctccgggcctcacccaggcgctaaataccaaagatggcgcagtgatggtgatgagttacgggaactccgaagaggatagtcaagaacataccggcagtcagttgcgtattgcggcgtatggcccgcatgccgccaatgttgttggactgaccgaccagaccgatctcttctacaccatgaaagccgctctggggctgaaataaaaccgcgcccggcagtgaattttcgctgccgggtggtttttttgctgttagcaaccagacttaatggcagatcacgggcgcatacgctcatggttaaaacatgaagagggatggtgctatgaaaataacattactggttaccttgcttttcggtctggtttttttaaccaccgtcggcgctgccgagagaactttaaccccacaacaacagcgtatgacctcctgtaatcagcaggcgacggcgcaggcgttgaaaggggatgctcgtaagacctacatgagtgattgcctgaagaacagcaagtctgcgcctggcgaaaaaagtttgacgccacagcagcaaaagatgcgcgaatgcaataatcaagcaacacaacaatctctgaaaggtgatgatcgtaataagtttatgagtgcctgcctcaagaaagccgcctgatacctgatagtgctaacgggtgagctacgaaaatggctcacccgaaatatcatacttctgcctttagctccgtctctataatttgggaaaattgtttctgaatgttcccaaaaataatgaatgatgaaaactttttcaaaaaagcggcggcgcacggggaggaacctcctttaactcctcaaaacgaacatcagcggtccgggctgcgcttcgcccgtcgcgtcagactaccccgtgcggttggcctggctggcatgttcttaccgattgctagtacgctggttagtcacccgccgccgggctggtggtggctggtgttggtcggctgggcgttcgtctggccgcatttagcctggcagatagcgagcagggccgtcgatccgcttagccgggaaatttacaacttaaaaaccgatgcagtattagcgggaatgtgggtaggcgtaatgggcgtaaacgtgctgccttccaccgcgatgttgatgattatgtgtctgaatttgatgggggcaggcggcccccgtctgtttgtcgcgggtctggtgttgatggtggtttcctgccttgtcaccctcgagctgacgggcattaccgtgagcttcaatagtgcgccgctggaatggtggctctcccttcccattattgtcatttatcctctgctgtttggctgggtcagctaccagacggcaaccaaactggcggaacataaacgcaggttgcaggtcatgagtacccgcgacggcatgacgggcgtgtataaccgacgtcattgggaaactatgttacgcaatgaatttgataactgtcggcggcataatcgcgatgcaacgttactgattatcgatatcgaccatttcaagagcatcaacgatacctggggccatgatgtgggcgatgaagcgattgtggcgcttacccgacagttacaaattgccctgcgcggtagcgatgtgattggtcggtttggcggcgatgagtttgcagtaatcatgtccggtacgccagctgagagcgccattaccgccatgttacgggtgcatgaagggctaaatacattacgtttgccgaatacgccacaggtaactttacggattagtgtgggggttgcgccgctgaacccacaaatgagtcactatcgtgagtggttgaaaagcgcagatttggcgctttacaaagcaaagaaagccggacgtaaccgcaccgaagtggcggcctgacgtccggcgaaagtcatcaggatttgctgagtttttcacttttttccatacacttcgtcatcgcttcgatcactgcagcacggaagcctttctcttccagtacgcgtaccgcttcaatggtggtgcctcccggactgcagaccatatctttcagtgcccccggatgttctcccgtttccagcaccatttttgcggaacccattaccgcctgagcggcaaatttatacgcctgggcgcgtggcatcccgcccagcacggcggcgtcggccatcgcttcgataaacataaatacgtaggctgggctagaaccgctcacaccgaccaccgggtggatcatcggctcagcaattacttccgcttcgccaaagcagcggaaaatattcagcacatcagcggtatcttctggggttaccagcgcgtttggcgttacggaggtcatcccggcattaaccagtgcgggagtgttcggcatggcgcggataattttccggtcatggcccagcgcgcgggcaagctggtcgagcgtgacacctgcagcaatagaaacgaccagagagtctttattcaggctggaggtgatttcgctaagcactttaatcatgatgccaggtttaacggcagcaaaaatgatgtcggcgatttgcgccacttcttgcgcgctttctgcggcgttgatgccgaactggtcatgcagggcggcgactttatccggggagggggtgtatacccagatttgccctggaagcacctgaccgctggcaatcagaccgccgagaatggcttttcccatattgccgcagccaataaaaccgattttcttttccattgcctcactcctgccgtgaaattcattgttttgataatcgctggcagaagcataaacagaactatgccggaaggcaaaagcgcgacacaatagaggattacccaacaaaggatgactttatgacaatttgggtggatgccgacgcgtgtcccaatgtaattaaagagattttgtatcgcgcggcggaacgtatgcagatgccgctggtactggtagcaaaccagagtttacgcgtgccgccaagccgatttattcgtacgctgcgcgtcgcggcaggtttcgacgttgccgataacgaaattgtccggcagtgtgaagcgggcgatttggtgatcaccgcagatatacctttggctgctgaagccatcgagaaaggcgctgcggcgcttaatccgcgcggcgaacgttacacgccagcgaccattcgtgagcgcctgacgatgcgcgattttatggataccttacgtgccagtgggatccagaccggcggaccagatagccttagtcaacgtgaccgccaggcctttgccgcggagctggagaagtggtggctggaagtgcaacgtagtcgtggctaaatgtaatttattatttacacttcattcttgaatatttattggtatagtaaggggtgtattgagattttcactttaagtggaattttttctttacaatcgaaattgtactagtttgatggtatgatcgctattctcatgacaccggctttcgccgcattgcgacctattggggaaaacccacgatgacacaacctctttttctgatcgggcctcggggctgtggtaaaacaacggtcggaatggcccttgccgatagccttaaccgtcggtttgtcgataccgatcagtggttgcaaagtcagctcaatatgacggtcgcggagatcgtcgaaagggaagagtgggcgggatttcgcgccagagaaacggcggcgctggaagcggtaactgcgccatccaccgttatcgctacaggcggcggcattattctgacggaatttaatcgtcacttcatgcaaaataacgggatcgtggtttatttgtgtgcgccagtaagtgtcctggttaaccgactgcaagctgcaccggaagaagatttacggccaaccttaacgggaaaaccgctgagcgaagaagttcaggaagtgctggaagaacgcgatgcgctatatcgcgaagttgcgcatattatcatcgacgcaacaaacgaacccagccaggtgatttctgaaattcgcagcgccctggcacagacgatcaattgttgattttcgagcgcctatacttaacgttcatcccgtgaaataaggaagaacgatgccaacgaaaccgccttatcctcgtgaagcatatatagtgacgattgaaaaaggaaagccaggacagacggtaacctggtaccaactcagagccgatcatcctaaaccagacagcttgatcagtgaacatccgaccgctcaggaagcgatggatgcgaaaaaacgctatgaggaccctgacaaagagtgaccgcatcagactgctcggaagggattctgagtgccactacaagggatctgcgtcacatttttcataattcatgtttttctaataattagaatattaaacaataacaatccattactggaatcatttggaatctttacattatgccgtgcacgtctgctgctacgctttttgtcatttgtagcacaagtaagtgtcagcagtggtgcttcacacttgcccggtaattaacgacgaaagaaaagtaaggtggatgaacaatgagtgcgagcttggcgatcctgaccatcggcattgtacctatgcaggaagttttgccgctcctgacggaatacattgacgaagataatatttcccatcatagcctgctggggaagttaagtcgtgaagaagtgatggcggagtacgcgccagaagcaggcgaagacaccattctcacattattaaatgacaaccagctggcccatgttagccgtcgcaaagtggagcgtgacctgcaaggtgtggttgaagtgctcgataatcagggttatgacgtcattttattaatgagtacagcaaacattagtagtatgactgcgcgtaatacgatctttcttgagccgagccgaatattgcctccactggtttcctctattgttgaagatcatcaggtgggggttatcgttccggttgaggagatgctgcccgttcaggcgcaaaaatggcaaattttgcagaaaagcccggtatttagtttgggtaaccccattcatgatagtgaacaaaaaatcattgatgccgggaaagaattactggcaaaaggggctgatgtcatcatgctggattgtttaggatttcaccaacgtcatcgcgatttactgcaaaaacagctcgatgttcctgtcttgctgtctaacgtattgattgcacggctggctgcggaattactggtgtaattttgcgtgacagccagcgcctctggcccctatagtgaagtagatgttcaactaccaaacagggccagtttatgcttcaaagtaatgagtacttttccggcaaagtgaaaagtatcggcttttccagcagcagcactggtcgcgccagcgtgggtgttatggttgaaggcgaatacaccttcagcaccgctgagccggaagagatgacggtaatcagtggcgcgctgaatgtgttactgcctgacgcgaccgactggcaggtgtatgaagccggtagcgtgtttaatgttcccggtcacagtgagtttcatctgcaagttgccgaacccacctcttatctgtgccgctatctgtaattcctcgccttccccttgaacgggagggcatttttctgaaatatcctttctttagcccataataatatttcctttgctgcgattttttcaatttccgatatattcataatttatcaaggttgatataaatatcagtgaagatctccagatattgttgcggaactggctacgataaaagataaatcagatgatgaatggtggcgtgcattgctgcaaagtcgcaatgatcatttacgccaaacggcattgcgcaacgcacataccccggcgttgttgttaacgacattgactgagcctcaggatcggagcctggctattaataatccacagctggctgccgatgtgaaaacggcgtggttaaaagaggatccaagtttactcttatttgtcgaacaacccgatcttagcctgttacgtgatttagtgaaaaccggggcaacgcggaaaattcgcagtgaagcgcgtcaccggcttgaggaaaaacaatgacacaacgtccatggagcaagttacagcgtaaaacgcataatattgctgcgctaaaaattattgctcgccgtagcgaataattatatgcctggtgtggcttcgtacgccggataagacgcggcaggcgtcgcatccggcattaaaggaaaatcagcaattaacgttgtgcttcgccacctaatccttcaatcaggttttgaattaacgctgccagttcaccagtcatcaggatgaaatcggcatcaaaacgctgggcgaaatcttcacggtcgatatcttcgttttgatcgcgcagctcgtcgcagaacttcagacgcttgaggctaccatcgtcgcacatcacaaactgaatgcgctgctgccagtcgagcgccagtttagtcaccacttttccggcttcaatgtgattggtgatctcttcgctggtcagatcttgtttcttcgcgcggatcacgccgccatcttccagcaagcttttcagctcggcttcatcaagcagctggaagccctgtgccgcactgccggagcgaacccattcggtcagcgtcagttcaatcgggttttccatgctcaatggtacaaccggtaagctccccaggcttttacgcagtaatgccagcgtatcttccgcttttttggcactggcgcagtccaccataatcaaaccgttaaccgtgtcgatccacatcattgtctggctaaaacggctgaaagcacgcggcagcagagagtgcagcacttcgtctttcaggctatctttttcggttttcttcagcttacgcgcctgttccgcttccagtttggcgattttcgcttccagcgcctgtttaatcaccggagacgggaggattttttcttctttgcgcgcgcagataacaatttgaccattggcaacgtgcgttaacgcatcgctgtggcttcccatcggaggaacccagcccatcttcgccatgtcctggctgccgcatggggtaaatgccatgctggctagctgtttttccatctcttctgcacgcaggctaatctcgcggctaagacggtaaaccattaaatttttgaaccacagcatgataatttccacggccttgtcgttaaatttagcgggcatgataacgaattgtcggcggccttgcattgccaatccggttgtccgtctctacgctattgatattgaaaaaaataaggagagtaccgtgcgtataggtatcgatttaggcggcaccaaaactgaagtgattgcactgggcgatgcaggggagcagttgtaccgccatcgtctgcccacgccgcgtgatgattaccggcagactattgaaacgatcgccacgttggttgatatggcggagcaggcgacggggcagcgcggaacggtaggtatgggcattcctggcagtattagcccttacaccggtgtggtgaagaatgccaatagtacctggctcaacggtcagccattcgataaagacttaagcgcgaggttgcagcgggaagtgcggctggcaaatgacgctaactgtctggcggttagtgaagcagtagatggcgcggcagcgggagcgcagacggtatttgccgtgattatcggcacgggatgcggcgcgggcgtggcattcaatgggcgggcgcatatcggcggcaatggcacggcaggtgagtggggacacaatccgctaccgtggatggacgaagacgaactgcgttatcgcgaggaagtcccttgttattgcggtaaacaaggttgtattgaaacctttattagcggcacgggattcgcgatggattatcgtcgtttgagcggacatgcgctgaaaggcagtgaaattatccgcctggttgaagaaagcgatccggtagcggaactggcattgcgtcgctacgagctgcggctggcaaaaagcctggcacatgtcgtgaatattctcgatccggatgtgattgtcctggggggcgggatgagcaatgtagaccgtttatatcaaacggttgggcagttgattaaacaatttgtcttcggcggcgaatgtgaaacgccggtgcgtaaggcgaagcacggtgattccagcggcgtacgcggcgctgcgtggttatggccacaagagtaaaaaacgtaggcaattggcgcatcatgcctgatgcgacgcttgccgcgtcttatcaggcctacaaaaggtgccagaaccgtaggccggataaggcgttcacgccgcatccggcaataagtgctccgatgcctgatgcgacgcttgccgcgtcttatcaggcctgcaaaatgtgccagaaccgcgtagggcggataaggcgttcacgccgcatccggcaataagtaatgagcaccgagactataacttaccccagtggtttcgccagcaccggagtatccgccgcttgctggcgcttatagcgaccatacagcagcaagctgctcatcgcagcaaagctaagcagggcggcaggcagcgccacgtaattatatgccagccccagcgtcagcatcatacctccgcaatatgcgccgacggcgctaccgaggttaaacgctatttgcccacctgcggcacctaataactctccgcctttggcgttttgtagtaacaatatttgtagcggtgcactaagggcaaataatcccgcgcaacaaataaaagcaaaaataaggctcgttgttttcatgccgccgcagaaaaagagcatcagcagtgccagtacaattataaagtcagttactgctgcaatgcgcagtggactataacgtccactaatcctgccacttagcatatttcccagcaccatccctagcccaactaacatcataataaaggtcatcgccgtttcgctaaaaccggaaataaacatcatgtatggctttacgtagctgaaccaggcaaacacacctgcgttgccaaacatcgtggcggcgaaaattaaccacggggccgggctgcgcaaaaagtgaaattgttcgcgcagatttcctttcgcctcgtcgcgaatatctggcacccaaaaatagacgcttgccatcaccgcaatattaaaaacagcgatcaataaaaaggtgtaacgccagctaaattcctgacttaaatacgttcccagcggaatgcccagcaaattggcgactgtcatcccggaaaccatccccgccacggcggcggtgacttttccgggtttgataattttacttaacacgatcgctccgacgccaaaaaatgcgccatgcggaaagccggataccagccgaccaatggcgagcatcaggtaagagctagagagcgtgaacatggcgttgccaatgacgcacaacgccaccagaaacaacaagatatgtttgagactgtagcggctggaaaagagtgcgatgattggcgcaccgaccaccacccccagtgcataatagctgatcatatgcccggcggcaggaatgctaattcctacgttatgcgccagctccgtgagcacgcccataatgccaaattcggccatccccaaaccaaacgtgcccagagccaaagataaaatgacttttttcataccaccatcacaaccaccagaacggctaccaatcaccgtagccaataaagtgatagcttgcaggataacgaccagcaaggccaagagataattcgcccctctgtattcattatcctgctgaatagttatttcactgcaaacgtactttccagtttgctgtagcccaggccgttgatctttttcactttgatctgcaccggaatacgctctttcatcgcttctacgtggctaatcacaccgatggttttgccactggcgttcagggcatccagcgcatcaagggcggtatccagcgtttcgctatccagcgtgccaaaaccttcatcaaggaacaggctgtcaatacgtgttttatggctgaccagatcgctaagcgccagcgccagcgccagactaacgaggaaactttcgccgccggaaagggtacgggtatcgcgtaccgcatctgcctgccaggtatcaacaacctcgacttccagcgcctcgctggctttgcgctgtaacagatagcgcccgtgcagccgggtaagttgctgattagcgagatggactaaattatccagcgtcagcccctgggcaaacttgcggaatttatcgccctctttggaacctattaggctattcagatatccccagtcctcaacctgctgcgtcatttgagcaatttgctgcattaaggtttgttgttgctgacggttatctgcatcctgcttcagctgctggcgaatctcgccttgactcgtggtgttttcacgcaacttttggtgagtttgcgctaactcttgctgaatctgctccaccgtcacagtgagagccaacccgtcgtcaggtcggtgttgttgatgctgtgccagcgtttctgctgtctgagtgaccagagtttgcgcctgacggcgctggttttccagattctgcttgagctgttccagctgcgttagtgtttgttcatccattagcgccgcaaggaacgcctgctgatcgtcaaagacgctggcctgtagcgcggtgtcaaactgcgcctgggctttttgcagactttgcgccgccagaacatcctgttgctgtaacgtctgctgctggctgtgtaatgcgagacattgttcatgtacctgccgccagttttccaataccacagtttcttcgcagtgcgggagttcatcactttgcggcaacgtttccagaatcggcgtcagctgctgaatacggttttgcagcgcggttaattcgttctggcgttgctgccagctctgcgcttcttgctgacgtgtcgccaaccagctctcttcttcatcttcctgtggcaatgtcagtgcataacccgtcaatgtcgttaaaagtagttgctggcgttgttcaatttgctgttgatactggataatttgctgattatgcgcggcaatctgcccttgtaattcatgccgttggctgagtaaccgcagctggcgttcgtgctcatcttgtgcatccagccacggttgaatatcgtccagtggctgcaaggtgatattgaggctggccgtgacggcttgccattgttgagtaagtgcttgctcatcttgtcggaggctttgcgcttcgttttcatcacgctgaagctgctttgttatggcgtccagttgcccacgtagcgtcgcaccttcttcaccgagctttttaacttcgttttccagcgccagtaatcgagactgattaacgccaggctccagcgcctgatacgcctcgaccgccgggtggctggtggaaccacaaagtgggcaaggctgacccgcctgtaactgtgcacgttgagcttccagcgttttgatgcgcgcttcctgctcgcaaatggttttcacatcggcaagttgctgcgtcttttctttataacgctggcgcatttcgttaagtgcggcgttacgttgcgtctgttcttgcgtgacattctggatagcgacctgtaactgcgccagacgtttttgttggggaacaatctgtccatgcagcgcgaccaggtgctgacgcagtgggcgttgctcagcatgttgcgccagggcggtagcaacttcatcggcggttaacgtcaacgtgatcgccgcaagcgcattaagtttttgctcagcatgggttaactgttgctgccattgccgcagatgctcgcgatcgctggtttgttgggagaactgcgcacgccaacccgccggttcgttgttccactgacggaagcggtcgtgttcctgtaaccaggtattcaggctttgttgctgctgctgtaattctgcactctgcttcgccgcgtggtggcgaatgctcgcgcgaagcgccattgtgctctgtaagcgagtatttacttcttcaatctgctggcgaatatgcgccagcgccgcgctgtgttctgcgatgcgttcccagtgtggacgaagatttcgtgccggttgtgccagactaagcgccgccagttgaggttgcgctttttcttcttcggctaacgcctgttgcaaggcctgctgacggcggctggcttcttgctgcaattcgtcctgacgcgttaaccagtttaggctttgttgttcttgctgctgcgcggtaattaactgtttttcttcgtcagtaagtacctgcaaactcgctgtcaggctttgcacttgttccggcgtgagcaacgtgacgccgctggcctgcgcttgcagcttctccagctctgtgcgggcgcttttgtgctgctcaaaaaccatcgcgctgatttgcccgtagatttcagtgccggttaactcctcgagcaattccgcgcgttctttgggtttggcattcaggaaggcagcaaattgcccctggctaagcagcatgctacgggtgaagcgcccgtaatccagcccggttaacgtcgctgtcagttccagcttatctttcactttgtcggcgagaattttgccgtcggcgcagcgcgccagctctacgcgtggcacctgcaaattaccgtcgggttggttacgcgcccgattctggctccagaatgcacggtacgcttcacctttcacttcaaactccacctccgccagacattcggcggtatcgcgggtcatgagatcattttggctttgactaacgttagagagacgcggagtttcgtgatacagcgccagacaaatggcgtccagcagggtggttttccccgcacctgttgggccggtaatagcaaacagcccgttgctggcgaacggctcgcgggtgaaatcaatcttccattcgccttttaaactgttcaggtttttcaggcgcaggctgagaattttcatgcttcgtgttctccggcgagggtatgcaacgtcgtggtgaaaagatgctgcagacgttgctgctggctttcatccagttcttccagtgccagacggcgattgaacacctcttcgacgctgagttcgctgagggtttcacgctgttggctggctaacacacgctcgcgctgttcacgactccgacgtaccagcaatacttcgacaggcaaactttcggttaatgcctggattttgcgctgaatatcatgcagatactcatcagtagtgatttcgatatccagccagacaggtggctcctggcttacatcgcgccactgttccagctgtgcggtaatgctcgccagatcgcctttcagcactgccatgggttgcgttaccggtacgttcaggttttccacgctctctaatttgccgttactaaatgtcaccagatggacatatttactcttaccgcattcatcaaaactcagtggaatgggggagccgcaatagcgaacatgttccatgccgccaataatctgtgcgcggtgaatatgcccgagcgcgatgtagtcggctggtggaaagttttgtgccggaaacgcgtccagcgtgccaatataaatgtcacgcacggcgtcacttttactggcccccacggtcgttaaatgtcccgtggcgatgatgggcagaggctgatcgccgcgcagtttgcaggcatcggcatagtgttgttggtaataatcggtaatcgctgccagtaaatgctgctgtttttcaataccgttaagccccgcctggctggtaataatgtcacgcggacgtaaaaacggaatggggcacagcactgcgcctggcgtcccgtcgcgacgaggcaagatttgcggcgcatgtccggcgctggcgaccacggtagtattgaggaacgccatgatatcgcggctttcattcagcgtggcgacgctgtcatggtttcctgccagtaccaccagatgacagccagtttgctgtaaattgacaacaaaacggttgtataacgtgcgggcgtaactgggcgggctgccggtatcgaaagcatcaccggcaacaataatcgcatccacctgatgggtttgtgctgtctccagcagccagtcaagaaaagcctgatgttcagcttcgcggcttttactgtagaagttctggccgagatgccagtcactggtgtgaaggatgcgcataacggttccctggcgaaaaagcatgggcgcgattatacccaaacagatgtgccatttgcttttttctgcgccacggaaatcaataacctgaagatatgtgcgacgagcttttcataaatctgtcataaatctgacgcataatgacgtcgcattaatgatcgcaacctatttattacaacagggcaaatcatggcgagacgtattctggtcgtagaagatgaagctccaattcgcgaaatggtctgcttcgtgctcgaacaaaatggctttcagccggtcgaagcggaagattatgacagtgctgtgaatcaactgaatgaaccctggccggatttaattctcctcgactggatgttacctggcggctccggtatccagttcatcaaacacctcaagcgcgagagcatgacccgggatattccagtggtgatgttgaccgccagaggggaagaagaagatcgcgtgcgcggccttgaaaccggcgcggatgactatatcaccaagccgtttagcccgaaggagctggtggcgcgaatcaaagcggtaatgcgccgtattagcccaatggcggtggaagaggtgattgagatgcagggattaagtctcgacccgacatctcaccgagtgatggcgggcgaagagccgctggagatggggccgacagaatttaaactgctgcacttttttatgacgcatcctgagcgcgtgtacagccgcgagcagctgttaaaccacgtctggggaactaacgtgtatgtggaagaccgcacggtcgatgtccacattcgtcgcctgcgtaaagcactggagcccggcgggcatgaccgcatggtgcagaccgtgcgcggtacaggatatcgttttagtacccgcttttaacgccttgctcatcggacgcagagcagggcttatgatttcttaactggagtatcttacgtgctggaacggctgagctggaaaaggctggtgctggagctgctactttgctgcctcccggctttcatcctgggtgcattttttggttacctgccctggtttttgctggcaagcgtaacaggactgcttatctggcatttctggaatttattgcgccttagttggtggctgtgggtggatcgcagtatgaccccgccaccggggcgtggtagctgggaaccgctactatacggcttacaccagatgcagctgcgaaataaaaaacgccgccgtgaactgggcaatctgattaaacgctttcgtagcggcgcggagagcctgcccgacgcggtggtgctgaccacggaagagggcggtattttctggtgtaacggtctggcgcaacaaattcttggtttgcgctggccggaagataacgggcagaacatccttaacctactgcgttacccggagtttacgcaatatctgaaaacgcgtgatttttctcgcccgctcaatctggtgctcaacaccgggcggcatctggaaattcgcgtcatgccttatacccacaaacagttgctgatggtggcgcgtgatgtcacgcaaatgcatcaactggaaggggcgcggcgtaacttttttgccaacgtgagccatgagttacgtacgccattgaccgtgttacagggttacctggagatgatgaatgagcagccgctggaaggcgcggtacgcgaaaaagcgttgcacaccatgcgcgagcagacccagcggatggaaggactggtgaagcaattgctgacgctgagcaaaatagaagccgcaccgacgcatttgctcaatgaaaaggttgatgtgccgatgatgctgcgcgttgttgagcgcgaggctcagactctgagtcagaaaaaacagacatttacctttgagatagataacggcctcaaggtgtctggcaacgaagatcagctacgcagtgcgattagcaacctggtctataacgccgtgaatcatacgccggaaggcacgcatatcaccgtacgctggcagcgagtgccgcacggtgccgaatttagcgttgaagataacggaccgggcattgcaccggagcatattccgcgcctgaccgagcgtttttatcgcgttgataaagcgcgttcccggcaaaccggcggtagcggattagggttagcgatcgtgaaacatgctgtgaatcatcacgaaagtcgcctgaatattgagagtacagtaggaaaaggaacacgtttcagttttgttatcccggaacgtttaattgccaaaaacagcgattaatccgcctttgtcatcttttattgccataagccagtcgatgctggcttattttctttgcagtcaaaatacgggcgttagattttacaacgattggtgattttttgttcgcatgattagccatgtctttttcacggaaatagtgttttatactggttggtgatttcttatcgctatatacctctggtttttagatccctccttgctttaaaacgttataagcgtttaaattgcgcttcaggtgctgtcatactgactgcattaacgcggtaaatcgaaaaactattcttcgccgcgcctggttgggagtatttcccgctaaaattgtttaaatataccgctgtatcatccccagggattggcacaaaaatttaacgttacaacaccacatccacaggcagtatgatttatgacccatcaattaagaagccgcgatatcatcgctctgggctttatgacatttgcgttgttcgtcggcgcaggtaacattattttccctccaatggtcggcttacaggcaggcgaacacgtctggactgcggcattcggcttcctcattactgccgttggcctgccggtattaacggtagtggcgctggcaaaagttggcggcggtgttgacagcctcagcacgccaatcggtaaagtcgctggcgtactgctggcaacggtttgttacctggcggtggggccgcttttcgctacgccgcgtacagctaccgtttcctttgaagtggggattgcgccgctgacgggtgattccgcgctgccgctgtttatctacagcctggtctatttcgctatcgttattctggttagcctctatccgggcaagctgctggataccgtgggcaacttccttgcgccgctgaaaattatcgcgctggtcatcctgtctgttgccgctattgtctggccggcgggttctatcagcacggcgactgaggcttatcaaaacgctgcgttttctaacggcttcgttaacggctatctgaccatggatacgctgggcgcaatggtgtttggtatcgttattgttaacgcggcgcgttctcgtggcgttaccgaagcgcgtctgctgacccgttataccgtctgggctggcctgatggcgggtgttggtctgactctgctgtacctggcgctgttccgtctggggagtgacagcgcgagcctggtcgatcagtctgcaaacggcgctgctattctgcatgcttacgttcagcacacctttggcggcggcggtagcttcctgctggcggcgttaatcttcatcgcctgcctggtaacggcagttggcctgacctgtgcttgtgcagaattctttgcccagtacgtaccgctctcttatcgtacgctggtgtttatcctcggcggcttcagcatggtggtttctaacctcggcttaagccagctgatccagatctccgtaccggtgctgaccgctatttatccgccgtgtatcgcactggttgtattaagttttacacgcagttggtggcataatagctcccgcgtgattgctccgccgatgtttatcagcctgctttttggtattctcgacgggatcaaagcatctgcattcagcgatatcttaccgtcctgggcgcagcgtttaccgctggccgaacaaggtctggcgtggttaatgccaacagtggtgatggtggttctggccattatctgggatcgcgcggcaggtcgtcaggtgacctccagcgctcactaaatcactgaacatttgttttaaccacggggctgcgatgccccgtggttttttattgtgttgatgggttaggaattgatggaaagtaagaacaagctaaagcgtgggctaagtacccgccacatacgctttatggcactgggtagtgcaattggcaccgggctgttttacggtagcgcagacgccatcaaaatggccggtccgagcgtgttgttggcctatattatcggtggtatcgcggcgtatatcattatgcgtgcgctgggggaaatgagcgtacataacccggccgccagctctttcagccgttatgcgcaggaaaacctcggcccgctggcaggttacattaccggctggacctactgctttgaaatccttattgtcgccatcgccgatgtgaccgcttttggtatctatatgggtgtctggttcccgacggtgccgcactggatttgggtactgagcgtggtgctgatcatttgcgccgtaaacctgatgagcgtgaaggtattcggtgagctggaattctggttcagcttctttaaagtcgccaccatcatcatcatgattgtcgccggtttcggcatcatcatctgggggattggcaacggcgggcaaccgaccggtattcataacctgtggagcaacggcggcttcttcagtaacggctggcttggcatggtaatgagcttgcaaatggtgatgtttgcttacggtgggatcgaaattatcgggattaccgccggtgaagcgaaagatcctgagaaaagcataccgcgtgcgattaactccgtgccgatgcgtattctggtgttctacgtcggtacgctgttcgtcattatgtctatctacccgtggaatcaggttggcactgccggtagcccgttcgtgctgacgttccagcatatgggcattacctttgccgccagcattcttaactttgttgtgctgactgctagcctgagcgcaattaacagtgatgtatttggcgtaggccgtatgctccacggtatggcagagcagggcagcgcgccgaaaattttcagcaaaacgagccgtcgcggtattccgtgggttacggtgctggtgatgactaccgcgctgctgtttgcggtgtatctgaactacatcatgccggaaaacgtcttcctggtgatcgctagcctggcaaccttcgccacggtgtgggtgtggattatgatcctgctgagccaaattgccttccgtcgccgtttgccgccagaagaagttaaggcgctgaaatttaaagtgccgggtggggtagcaacgaccatcggcgggctgattttcctgctctttattatcgggttgattggttatcacccggatacgcgtatcagcctgtatgtcggtttcgcgtggattgttgtgctgttgattggctggatgtttaaacgccgccacgatcgtcagctggctgaaaaccagtaatccttgcgttctgtaagccggttcaggaggaaatcctgatccggctattccgaaagttatccgcccccgtcctcctcccccaaatatccttcagatgatgagtgatcctgcattaggctatggcaaggtgatcagattttcatcacaggggaattatgatgttaaatgcatggcacctgccggtgcccccatttgttaaacaaagcaaagatcaactgctcattacactgtggctgacgggcgaagacccaccgcagcgcattatgctgcgtacagaacacgataacgaagaaatgagtgtaccgatgcataagcagcgcagtcagccgcagcctggcgtcaccgcatggcgtgcggcgattgatctctccagcggacaaccccggcggcgttacagtttcaaactgctgtggcacgatcgccagcgttggtttacaccgcagggcttcagccgaatgccgccggcacgactggagcagtttgccgtcgatgtaccggatatcggcccacaatgggctgcggatcagattttttatcagatcttccctgatcgttttgcgcgtagtcttcctcgtgaagctgaacaggatcatgtctattaccatcatgcagccggacaagagatcatcttgcgtgactgggatgaaccggtcacggcgcaggcgggcggaagtacgttctatggcggcgatctggacgggataagcgaaaaactgccgtatctgaaaaagcttggcgtgacagcgctgtatctcaatccggtgtttaaagctcccagcgtacataaatacgataccgaggattatcgccatgtcgatccgcagtttggcggtgatggggcgttgctgcgtttgcgacacaatacgcagcagctgggaatgcggctggtgctggacggcgtgtttaaccacagtggcgattcccatgcctggtttgacaggcataatcgtggcacgggtggtgcttgtcacaaccccgaaagcccctggcgcgactggtacagctttagtgatgatggcacggcgctcgactggcttggctatgccagcttgccgaagctggattatcagagcgaaagtctggtgaatgaaatttatcgcggggaagacagtattgtccgccactggctgaaagcgccgtggaatatggacggctggcggctggatgtggtgcatatgctgggggaggcgggtggggcgcgcaataatatgcagcacgttgccgggatcaccgaagcggcgaaagaaacccagccggaagcgtatattgtcggcgaacattttggcgatgcacggcaatggttacaggccgatgtggaagatgccgccatgaactatcgtggcttcacattcccgttgtggggatttcttgccaataccgatatctcttacgatccgcagcaaattgatgcccaaacctgtatggcctggatggataattaccgcgcagggctttctcatcaacaacaattacgtatgtttaatcagctcgacagccacgatactgcgcgatttaaaacgctgctcggtcgggatattgcgcgcctgccgctggcggtggtctggctgttcacctggcctggtgtaccgtgcatttattacggtgatgaagtaggactggatggcaaaaacgatccgttttgccgtaaaccgttcccctggcaggtggaaaagcaggatacggcgttattcgcgctgtaccagcgaatgattgcgctgcgtaagaaaagtcaggcgctacgtcatggcggctgtcaggtgctgtatgcggaagataacgtggtggtatttgtccgcgtgctgaatcagcaacgtgtactggtggcaatcaaccgtggcgaggcctgtgaagtggtgctacccgcgagtccgtttctcaatgccgtgcaatggcaatgcaaagaagggcatgggcaactgactgacgggattctggctttgcctgccattagcgctacggtatggatgaactaacgttttataacgccttgcgactcgcctgcgccatcatccgcggataaaactgccagaagcgggtttcgagggcgtcataatgagcgtctaaatcgtaccaggagtcacgcagggcatccagacgtgggcggcggcttgccatgccgtttaacacgttctggatgaaatccatatcgcgatagcgcaccagccactgctcactccacaagtaattgttcagattgataaaacgtggcggactgtccggcaaaatcgtcatcacttgctcgcgggcataacagacaaattcctgtagcggaaagtccgggctcagctggctccagtggcgggaaagaaagtgatcccacatgacatccagcgtaataggcgcaacgcggcgcgtttcactacgaaaccactcccgtgcttcgcggacttccggcagattgtcagtcaatacgtcgatacgtcgatgcatatgaatgccagccacgacgtcgggcggaaaactttcttcaggatttccgcgtacgaaatcagccagtaaattgccggaaaggctgctttccgcgagatgggctaaatgcaggtgagctaaaaaattcatcgattatattctatccaaaagggggtaaaggttgcagggagagcgccccggcactagactacccgcctcttattttagtctgagtcagtgtcatgcgcgttaccgatttctcctttgaattgcccgaatccctgattgcccactatcccatgcctgaacgcagtagctgtcgtttactgagcctggacgggccgacgggcgcgctgacgcacggtactttcaccgatttacttgataagctcaaccccggcgatcttctggtttttaataatacccgcgtgatcccggcgcgcctgtttgggcgtaaagccagcggcggcaagattgaagtgctggttgaacggatgctcgacgacaaacgcattcttgcgcatattcgcgccagcaaagcgccaaaacctggcgcagaactgctgctgggcgatgacgaaagtattaacgcaacaatgaccgcgcgccacggcgcactgtttgaagtcgaatttaatgatgaacgcagcgtgctggatattctcaacagcatcggccatatgccgctgccgccgtatatcgaccgtccggacgaagacgctgaccgcgaactttatcaaaccgtttatagcgaaaaaccgggcgcggttgcagccccgaccgcaggtctgcattttgacgagcctttgctggaaaaattgcgcgccaaaggcgtggagatggcgtttgtgacgttgcacgttggtgcgggcaccttccagccggtgcgcgtcgacaccattgaagatcacatcatgcacagcgaatacgctgaagtaccgcaggatgtggtagacgcggtactggcggcgaaagcgcgcggtaaccgggtgattgcggttggcaccactagtgtacgtagcctggaaagcgcggctcaggcagcgaaaaacgatctcattgaaccgttcttcgacgatacccaaatctttatctatccgggcttccagtacaaagtggtcgatgcgctggtgacgaacttccacttgccagagagcacgctgattatgctggttagcgcctttgccggttatcaacacaccatgaacgcctataaagcagcggtagaagagaaatatcgcttttttagttacggtgatgcgatgtttatcacgtacaatccgcaggcaattaatgagcgcgtcggggagtaattccgcggcgctggtttaaaacgttggactgtttttctgacgtagtggagaaaaaatgaaatttgaactggacaccaccgacggtcgcgcacgccgtggccgcctggtctttgatcgtggcgtagtggaaacgccttgttttatgcctgttggcacctacggcaccgtaaaagggatgacgccggaagaagttgaagccactggcgcgcaaattatcctcggcaacaccttccacctgtggctgcgcccgggccaggaaatcatgaaactgcacggcgatctgcacgattttatgcagtggaaggggccgatcctcaccgactccggcggcttccaggtcttcagccttggcgatattcgtaaaatcaccgaacagggcgtgcacttccgtaacccgatcaacggcgatccgattttcctcgatcctgaaaaaagtatggagattcagtacgatcttggtagcgatatcgtcatgatctttgatgagtgtacgccgtatcctgctgactgggattacgcaaaacgctccatggagatgtctctgcgttgggcgaagcgtagccgtgagcgttttgacagtctcggaaacaaaaatgcgctgtttggtatcatccagggcagcgtttacgaagatttacgtgatatttctgttaaaggtctggtagatatcggttttgatggctacgctgtcggcggtctggctgtgggtgagccgaaagcagatatgcaccgcattctggagcatgtatgcccgcaaattccggcagacaaaccgcgttacctgatgggcgttggtaaaccagaagacctggttgaaggcgtacgtcgtggtatcgatatgtttgactgcgtaatgccaacccgcaacgcccgaaatggtcatttgttcgtgaccgatggcgtggtgaaaatccgcaatgcgaagtataagagcgatactggcccactcgatcctgagtgtgattgctacacctgtcgcaattatagtcgcgcttacttgcatcatcttgaccgttgcaacgaaatattaggcgcgcgactcaacaccattcataaccttcgttactaccagcgtttgatggcgggtttacgcaaggctattgaagagggtaaattagagagcttcgtaactgatttttaccagcgtcaggggcgagaagtaccacctttgaacgttgattaatattaataatgagggaaatttaatgagcttttttatttctgatgcggtagcggcaacgggtgcaccggcgcaaggtagcccgatgtctttgattttgatgctggtggtattcggtctgattttctatttcatgatcctgcgtccacagcagaagcgcaccaaagaacacaaaaagctgatggactccattgccaaaggtgatgaagttctgacgaacggtggcctggttggtcgcgtaaccaaagtagcggaaaacggctacattgctatcgcgctgaatgacaccactgaagtagttattaaacgtgacttcgtagctgccgtcctgccgaaaggcaccatgaaggcgctgtaattaaaatttttccctaagggaattgccgtgttaaaccgttatcctttgtggaagtacgtcatgctgatcgtggtgattgtcatcggtctgctgtatgcgcttcccaacctgtttggtgaggatccggctgttcagatcactggtgcgcgcggagtcgccgccagtgagcaaacgctgatccaggtccagaaaacgttacaagaagaaaaaataactgctaagtctgtggcactggaagagggcgctattcttgcgcgcttcgactccactgacacccagttgcgcgctcgtgaagcattaatgggcgttatgggtgacaaatacgtcgtggcgcttaaccttgccccggcaacgccgcgctggctggcagctattcacgctgagccgatgaagctcggccttgacctgcgtggcggcgttcacttcctgatggaagtggatatggacaccgcgcttggcaaactccaggaacaaaatatcgatagcctacgcagtgacctgcgcgaaaagggcatcccgtataccactgttcgtaaagaaaacaactacggcctgagcatcactttccgcgatgctaaagctcgtgatgaagccattgcgtatctgagcaagcgccatccggacctggtgattagcagccagggcagcaaccagctgcgtgcggtaatgagcgatgctcgtctgagtgaagcgcgtgaatatgcggtgcagcagaacattaatatcctgcgtaaccgtgtaaaccaacttggcgtggcggagccggtggttcagcgtcagggtgctgaccgtatcgttgttgaactgccaggtattcaggacactgcgcgtgcgaaagagattctgggtgcgacggcaacgctggaattccgtctggtaaacaccaacgttgaccaggccgctgcggcatccggtcgcgtaccgggcgactctgaagtgaaacagacccgcgaaggtcagccagttgtgctgtacaaacgcgtaattctgaccggtgaccatatcaccgactccacttccagccaggacgaatacaaccaaccgcaggttaacatcagcctcgatagcgctggtggtaacatcatgtctaacttcactaaggacaacatcggcaaaccgatggcaaccctgtttgtggagtacaaagacagcggtaagaaagatgcaaatggtcgtgcggttctggtgaaacaggaagaggtgattaacatcgccaacatccagtctcgtctgggtaacagcttccgtatcaccggcatcaacaacccgaacgaagcccgtcagctgagtctgctgctgcgtgccggtgcgttgatcgcgccgattcagattgttgaagaacgtaccattggcccaaccctgggtatgcagaacattgaacaggggctggaggcttgccttgccggtctgctggtttctattctgttcatgatcatcttctataagaagtttggtctgattgcgaccagtgctctgattgccaacttgatcttaatcgtcggcattatgagcctgttgccaggcgcaacgctgagtatgccaggtatcgcgggtatcgtcttaacccttgcggtggcggtcgatgcgaacgtactgatcaacgaacgtattaaagaagagttgagcaacggacgtactgttcaacaggcaattgatgaaggttatcgtggcgcattcagttctatcttcgatgcgaacatcaccacgctgattaaagtcatcatcctgtacgcagtgggtaccggggcaattaaagggttcgcgattactaccggtatcggtgtggcgacgagcatgtttaccgcgattgtcggtacgcgtgccatcgtaaacctgctatatggcggcaagcgcgtcaagaagctgagtatctgaggagtgcgatgtggcacaggaatatactgttgaacaactaaaccacggccgtaaagtctatgactttatgcgctgggactactgggctttcggcatctctggtctgctgttaatcgctgctatcgttattatgggcgtgcgcggctttaactgggggctggatttcaccggtggtacggttattgaaattacgctcgaaaaaccggctgaaattgacgtaatgcgtgatgcattgcaaaaagccggttttgaagagccgatgctgcaaaactttggtagcagccatgacatcatggtccgtatgccgcctgctgaaggcgaaaccggcggtcaggtgttgggcagccaggttctgaaggtgattaacgaatccaccaatcagaatgcagcagtgaagcgtattgagttcgtcggtccgagcgtgggggcagaccttgcgcaaaccggtgcgatggcgttgatggcagcgctgctgtctatcctcgtgtacgtaggtttccgctttgagtggcgactggcggcaggggtggttattgcgctggcgcacgacgttatcattacgctgggtattttgagcttattccatatcgagattgacctgaccattgtggcaagcttgatgagcgttatcggttacagccttaacgacagtatcgtggtaagcgaccgtattcgtgaaaacttccgcaagatccgtcgcggtacgccttacgaaatctttaacgtgtccttgacccagacgctgcaccgtaccttgatcacatccggtactaccttgatggttatcctgatgctgtacctcttcggtggtccggtactggaaggcttcagcctgaccatgcttatcggtgtttccatcggtactgcatcttccatctatgtggcatctgcgttggctctgaaactgggtatgaagcgcgaacacatgttgcagcagaaagtggaaaaagaaggggcggatcagccgagtattctgccgtaatcaagttcccgttgatgttgaaaatcccggtcagaagatcgggattttttttgatgtatggagattgcgaaaatccccgcatcttgggaaactgcgcgtaaccctacatttcatccaggtaacttttcatggctatcatcccaaaaaactatgcgcggttagaaagcggctatcgcgaaaaagcattaaaaatctatccgtgggtctgcggtcgctgttcccgcgagtttgtttattccaacctgcgtgaacttaccgttcaccacattgatcacgaccataccaataacccggaagatggcagtaactgggaattgttgtgtctctattgccacgatcatgagcatagcaaatataccgaagcggatcagtatggtacgaccgttatcgcaggggaagatgcgcagaaagatgtcggtgaagcgaagtacaacccattcgctgacctgaaagcgatgatgaacaagaagaagtgattaaaacgtaaaattgcctgatgcgctacgcttatcaggcctacgttatttcagcaatatattgaatttacgtgcttttgttggccggacaaagcgtttacgccgcatccggcatgaacaaagcacacgttgttaacaatcagaaatgccgggaataaatcccggcattttcataatcagaagttgtaacctactaccaggtaaccaccccagccggtagagcgaacgttgaagttgccgttgccgaagttcagttctgcatcgtcgttccactgaccaccgtcgtgccagtaacgagctacgacagagtagtgccagtgatcgtagttcagagccagaatatggctggaagcgatagagttattagtacgggtcttaataccgttgattgcgttaccgctgtcatcccctaaatcggaaccccagtcgaagttggtgaagccgatgtagctcagctgaccgccccacagatcggtaatcggcacaaagtatttaattttgaaacggtaaccgtcccactcgttttcgttcgctgcgccatagttctgccactggtatttcgcatagacgttcatggacaggctcatcggcaggccagtgtcgatatcggtacccagacccatgtaccaggtgctctggcgaccatctttattacgacccatgtcgtaaatgtagttgttcgcgaagtaccactctttgaacggaccgaagctaaggtcagtattggtcagcttgtcgatggagaaacgtggttcgatttccataaacagcggagaaccgtggttccagatacctttagcatcggagttaccgccgaagaataccggcgcatccgcataaccatagaagtcgaaccagtcttttttagcgaatgcttcgtactcaaggtaggtatcgttgcggatctgcggtccgaaacgggtgtgatagcttccgacaacgttaacgctctggtgccaccagtcggaaagatactgcggtttgtcgttttcagctgcgttgacagtaaaagagctagagagcgccagtaccgcaccggctgccagtaatgtttttttcatatgtatgccactgtttgaaaatcccttgcgggagtgaaaaaggcgcaaattgcgtttctaaatatttcgtatacagaggagcctattataaaaatcattgctcacaaaaatatgtttcgtttcacagttctatcatttacgtaatcgattgcgttcacgtttacacacattcgggcggggattgtactgactttcgcccttgttgcaaacttttactatcaatccaggtgatgtaagcagagtaacaaaatgacggggaaagatgttgcgggacgcacaaaatcgtcccgaaatacgtttactgcataacaggttgaatgtcgtggatacgtacaaagcctaactgatccacagaaatcccctttaactgtaacggaatatcaacatcgctgggggcgaggacgctggcaggggcattaatcaattgattctgcacattgatttcctgaaagttgtctattgttccctgaatttgcccatattcaacagttccgctgaatgcgggcaagggatcattgctctcaccctgaatacgtagtgtaagggtggtgccatctgcatcaggcgtaatattcaccaggctcatacgtaaagtaccgatctggctttccagtcttgccggtgttttcgctccaggcagaaggtaaaccccactgctggattttgcattcagcctgttttgctgagtgattttgactgtttcttgattgagttgcgtcatctcctggttcagcgtgctgacgctgtgtttcatctgtcgcacttcactttgctgcacacaggcgctaaggctgaacaggcttcccagcaggagcagtcgaaaaacgttagtattcataggtcgtccctttctcgtcgcaattagcctaatggtagagggtaaaagcagcgaaagcatcgatcctttatctcaaaagcgttgcgcctttgttgtatcgtcagttcagggtaaaatagatttccgttaaccacctggtcaggacgccgtatgcattgcccattctgtttcgccgtggacactaaggtaattgactctcgtctcgtgggcgagggtagttccgtacgccgccgtcggcagtgtctggtgtgtaatgaacgtttcaccacctttgaagtggcggagctggttatgccgcgtgttgtaaaaagcaacgacgtgcgtgaaccgtttaatgaagagaaattgcgtagcggaatgctgcgggcgctggaaaaacgtccggtgagttccgatgacgtcgaaatggcaatcaatcatattaaaagccagctgcgcgccaccggtgagcgcgaagtgccgagcaagatgattggcaatctggtgatggagcaattgaaaaagctcgataaagtcgcctatatccgttttgcctctgtctaccgcagtttcgaagatatcaaagaatttggcgaagagatcgcgcgcctggaggactaagccgtgcaggacgagtattacatggcgcgggcgctaaagctggcgcaacgaggacgttttaccacgcatcccaacccgaatgtcgggtgcgtcattgtcaaagatggcgaaattgtcggtgaaggttaccaccaacgtgcgggtgaaccacatgccgaagtacacgcgttgcgtatggcgggtgaaaaagccaaaggtgcgaccgcctatgtcacactcgaaccctgtagccatcatggtcgtacgccaccgtgctgtgacgcactcatcgccgctggcgtagcgcgcgtggttgccagcatgcaagatcctaacccgcaggtcgctgggcgtggactttaccgtctgcaacaggctggcattgacgtcagccacggcctgatgatgagtgaagccgagcaattgaataaaggctttctcaagcggatgcgcaccggctttccttatattcagttaaaacttggcgcaagccttgatggtcgcacggcgatggcgagcggcgaaagccagtggatcactagcccccaggcgcggcgtgatgtacaactactgcgcgcgcaaagtcatgccattttaaccagcagcgccacggtgctggcggatgatcctgccttaacggtgcgttggtctgaactggatgaacaaactcaggcgctctatccgcaacaaaatctccgtcagccgatacgtattgtgattgatagccaaaatcgcgtgacgccggtacatcgcattgtgcagcagcccggcgaaacctggttcgcgcgtacgcaggaagattctcgtgagtggccggaaacggtgcgtaccttgctgattccagagcataaaggtcatctggatctggttgtactgatgatgcaactgggtaaacagcaaattaacagcatctgggtggaagcggggccaacgctcgctggcgcattgctgcaggcgggtttagtcgatgagctgattgtctatatcgcacctaaactattaggcagcgacgcccgcggattatgcacgctgccagggcttgagaaattagccgacgccccccaatttaaattcaaagagatacgtcatgtaggcccggatgtttgcctgcatttagtgggtgcatgatctcccggctcgaaagggaagcagcgcacgaaatattatgctaaaatccgcccccctgcggggccatactcgaacccgaaggaagaaaatgaacattattgaagctaacgttgctaccccggacgctcgcgtcgccatcaccatcgcgcgtttcaacaactttatcaatgacagcctgctggaaggtgcaattgacgcactgaaacgtatcggtcaggtaaaagatgaaaacattaccgttgtttgggtgcctggtgcctatgagctgccgctggcggcgggtgcactggctaaaaccggtaaatacgacgcggtgattgcgctgggtacggttattcgtggtggcactgcccactttgaatatgtcgctggtggtgcaagcaacggcctggcgcatgttgcccaggacagcgaaattccggttgcttttggggttctgaccactgaaagcattgaacaagcgatcgaacgtgctggcaccaaagctggcaacaaaggtgcagaagctgcactgaccgcgcttgaaatgattaatgtattgaaagccatcaaggcctgaaattagtaaggggaaatccgtgaaacctgctgctcgtcgccgcgctcgtgagtgtgccgtccaggcgctctactcctggcagttgtcccagaacgacatcgctgatgttgaataccagttcctggctgaacaggatgtaaaagacgttgacgtcctgtacttccgtgagctgctggccggggtggcgactaataccgcatacctcgacggactgatgaagccatacctgtcccgcctgctggaagaactgggacaggtagaaaaagcagtactgcgcattgcgctgtacgaactgtctaaacgtagcgatgtgccatacaaagtggccattaacgaagcgatcgaactggcgaaaagcttcggcgcagaagacagccataagttcgtcaacggcgtactcgataaagcagcacctgtgattcgccctaacaaaaagtgatatccaggccggtagattcacggaagaccgttccatgatcgccggccttttcttttttacctgctgaggcataacgtatggcatgtggcgagttctccctgattgcccgttattttgaccgtgtaagaagttctcgtcttgatgtcgaactgggcatcggcgacgattgcgcacttctcaatatccccgagaaacagaccctggcgatcagcactgatacgctggtggcgggtaaccatttcctccctgatatcgatcctgctgatctggcttataaagcactggcggtgaacctaagcgatctggcagcgatgggggccgatccggcctggctgacgctggcattaaccttaccggacgtagacgaagcgtggcttgagtccttcagcgacagtttgtttgatcttctcaattattacgatatgcaactcattggcggcgataccacgcgtgggccattaagtatgacgttgggtatccacggctttgttccgatgggacgagccttaacgcgctctggggcgaaaccgggtgactggatctatgtgaccggtacaccgggcgatagcgccgccgggctggcgattttgcaaaaccgtttgcaggttgccgatgctaaagatgcggactacttgatcaaacgtcatctccgtccaagcccgcgtattttacaggggcaggcactgcgcgatctggcaaatagtgccatcgatctctctgacggtttgatttccgatctcgggcatatcgtgaaagccagcgactgcggcgcacgtattgacctggcattgctgccgttttctgatgcgctttctcgccatgttgaaccggaacaggcgctgcgctgggcgctctctggcggtgaagattacgagttgtgtttcactgtgccggaactgaaccgtggcgcgctggatgtggctctcggacacctgggcgtaccgtttacctgtatcgggcaaatgaccgccgatatcgaagggctttgttttattcgtgacggcgaacctgttacattagactggaaaggatatgaccattttgccacgccataaagatgtcgcgaaaagtcgcctgaagatgagtaatccgtggcatctacttgctgtcggattcggaagtggattaagcccgatcgttcctgggacgatgggcagcctggcagcgattccgttctggtatctgatgacctttttgccctggcagctctacagcctggtggtgatgctggggatctgtatcggcgtctatctttgtcatcaaacggcgaaagacatgggtgtgcacgatcatggcagcattgtctgggacgaatttattggtatgtggatcacgctcatggcgctgccgaccaatgactggcagtgggttgccgccgggtttgtgattttccgtattctggatatgtggaagccgtggccgatccgctggtttgatcgcaatgtgcatggcggcatggggatcatgatcgacgatattgtcgccggggtgatttccgcaggcatcctgtattttatcggtcatcactggccgctgggtattctgagctaattgtgcaccgatgcctgatgtgacgcttgtcacgtctcatcaggcctggactcttatttaaatcctacgacaggatgcggtttatacggcgtttccagttcggcaatctgttccggcttcaaagtgatatccaccgcgttcaatagctcatcaagctgttcttcgcggctagttccgataatcggtgcggcaatgcccggtttactcaacaaccaggccagcgcaacttgtgctcgtgtcgcccccagttcttcactgacgcctgttaaccgctctgcgatctgcgcgtcattttcatcgctttctttatagagatttttccccacctcatcagacaccagtcgtgcggtagtttctccccacggacgcgtcagacggccccttgccagcgggctccatggaattaccgccacgccctcctgataacacagtggtagcatctcgcgctcttcttcacgataaatcagattgtagtgatcctgcatactgacaaactgcgcccagccgtgctgtttttggagttccagtgcctgagcaaactggctagcgtgcatactactcgcgccgatataacgcgctttcccggcttttaccacgtcgttgagggcttccagcgtctcttcgatcggcgtgttgtaatcccagcgatgaatttgcaggatatcgacataatccatgccgagacgtcgcaggctgtcgtcgatagagcgcaaaatttgcgcacgggataatccttccggtaaatcaccaacgcgatggaacactttggtcgcaacgaccacgtcttcacgacgggcgaaatcccgcagtgcgcgaccgacgatctcttcgctgctgccgtcagaataactgttggcggtatcaaagaaatttatgccgccttccagtgcacgtttaattatgggacggctgctttcttccggcagtgtccatgcgtgattaccgcgatctggctcgccaaaggtcatacagccgaggcaaagtcgggaaacgcgaaggtcggtttttcctaaggggttgtattgcatgctgccactcctgctatactcgtcatacttcaagttgcatgtgctgcggctgcattcgttcaccccagtcacttacttatgtaagctcctggggcttcactcgtttgccgccttcctgcaactcgaattatttagagtctatgaataatttcttaagcatagcaggagtggagtagggattatgccagccaggccttgattttggcttccataccagcggcatcgaggccgagttcggcgcgcatttcttcctgagttccttgcggaataaagaagtccggcaggccaatgttcagcacgggtactggtttacgatgggccatcagcacttcgttcacgccgctgcctgcgccgcccataatggcgttttcttctacggtgaccagcgcttcatggctggcggccatttccagaattaacgcttcatcaagcggtttcacaaaacgcatatcgaccagcgtggcgttcaggctttcggcgactttcgccgcttctggcatcagcgtaccaaagttaaggatcgccagtttctcgccacgacgcttcacaatgcctttgccaattggtagtttttccagcggcgtcagttccacgccgaccgcgttgccacgcgggtagcgcaccgcactcgggccatcgttatagtgatagccggtatagagcatctggcgacattcgttttcatcgctcggggtcataatgaccatttccggtatgcagcgcaggtaagagagatcaaaagcaccctgatgggtttgaccgtcagcaccaacaatgcccgcgcggtcgatggcgaacaggaccggaagcttttgaatcgccacgtcatgcagcacctgatcataggcgcgttgcaggaaagtggagtaaatcgcgacaatgggtttgtacccaccaatcgccagacccgcagcaaaggtcaccgcgtgttgctcggcaattgccacgtcgaagtagcgatccgggaatttacgactaaactcgaccatgccggaaccttcacgcatcgccggagtaatcgccatcagcttgttgtctttcgctgccgtttcgcacaaccagtcgccaaagattttactatagctcggcaaaccgccgctacttttcggcaaacaaccgctggagggatcaaatttaggcacggcgtggaaagtgatcgggtctttttctgccggttcataaccacgaccttttttggtcatgatatgcaggaactgcgggcctttcaggtcgcgcatgttctttagcgtggtgataagccccagcacatcgtgaccgtccaccgggccgatgtagttaaagcccagctcttcaaacaacgtgccaggcactaccatgcctttaatatgttcttcggtgcgtttgagcagctctttaattggcggcacgccagagaaaacttttttcccgccttcgcgcagactagagtaaagcttaccggaaagcagctgtgccagatggttgttgagcgcgccgacattttcggaaatgctcatttcattgtcgttgagaatcaccagcatatcaggacggatatcgcccgcgtgattcatcgcttcaaacgccatgcctgcggtaatcgcgccatcgccaatgacacagacggtgcggcgatttttgccttctttttcggcagcaaccgcaataccaattccggcactgatggaggtactactatgcccgacgcttaatacgtcatattcgctttcgccgcgccacgggaacgggtgcagaccgcctttctgacggatggtgccgattttgtcgcggcgtccggtcaaaattttatgcggataagcctgatgccccacatcccaaatcaattggtcaaacggggtgttgtagacatagtgcagcgccacggtcagttcgaccgtgcccagcccggaggcgaagtgcccgctggaacggctcacgctgtcgagtaaatagcggcgcagttcgtcgcagagtttcggtaaactctctttcggcaacagtcgtaactcctgggtggagtcgaccagtgccagggtcgggtatttggcaatatcaaaactcatcaggggcctattaatacttattgtttatttattacgctggatgatgtagtccgctagcgcttccagtgcgctggtatcgagactctgttcagccagttgtttcaggctctgacgggcatcgtcgatcagatcccgggctttcttccgggcttgctcaagacccagaagtgcagggtaggtacttttaccaagttgctggtcggcaccctggcgttttcccaacgttgcagtatctcccaccacatccaggatgtcatcctgaacctggaaggcaaggccgatgctctctgcatacttgtcgagtaccggcagagcacgacgtcctttatctccggcgcttaatgcaccaaggcgaacggcggcgcgaatcaatgcgccggttttatgacgatgaatacgctcaagcgcgtccagaggtacgtgtttgccttccgcgtctaaatctaatgcctgaccaccgcacattccggcaataccactggcgctcgccagttcagaaatcatgctaattctgtcgcggtcgctcacttccggcatatcggcatcgcttaaaatgctgaacgccagcgtttgtaaagcgtcgccagcgagaatcgcgtttgcttcgccaaacttcacatggcaggttggcaaaccgcgacgcagatcgtcatcatccattgccggtaaatcatcatgaattaaactgtaagcgtggatacactcaacggcggcagcgggtgcgtccagcgtgtttgtgctaacgccgaacatatgaccggcggcataaaccaggaaaggtcgcaggcgcttaccacctaataatgcgccatactgcatggtttcgaccacgggagtgttctgaaagggcagtggggcgataaaacggctcagcgcctggttggcctgcttaacgcaggcttcgagttgctgcggaaagtccattactcattgtccggtgtaaaaggggttagagaggcgtcttcattgtcagacagcagaatttgtacgcgctgttcggcttgttgtaatttggcctgcccctgacgtgccagctgcacgccgcgttcgaactcgttcagcgcctcttccagcggcaggtcgccactttccagacgggttacaatctgttccagctcgctcagcgccttttcaaagctggcgggcgcctcatttttcttcggcataatgaatgtctgactctcaatatttttcgccccgtcatggtaacggactcagggcaaatagcaaataacgcgcaatggtaaggtgatgtgcacagcaaagcgatgttagtggtatacttccgcgcctggatgcagccgcaggtgtgggctgctgtatttttccctatacaagtcgcttaaggcttgccaacgaaccattgccgccatgaagtttatcattaaattgttcccggaaatcaccatcaaaagccaatctgtgcgcttgcgctttataaaaatccttaccgggaacattcgtaacgttttaaagcactatgatgagacgctcgctgtcgtccgccactgggataacatcgaagttcgcgcaaaagatgaaaaccagcgtctggctattcgcgacgctctgacccgtattccgggtatccaccatattctcgaagtcgaagacgtgccgtttaccgacatgcacgatattttcgagaaagcgttggttcagtatcgcgatcagctggaaggcaaaaccttctgcgtacgcgtgaagcgccgtggcaaacatgattttagcagcattgatgtggaacgttacgtcggcggcggtttaaatcagcatattgaatccgcgcgcgtgaagctgaccaatccggatgtgactgtccatctggaagtggaagacgatcgtctcctgctgattaaaggccgctacgaaggtattggcggtttcccgatcggcacccaggaagatgtgctgagcctcatttccggtggtttcgactccggtgtttccagttatatgttgatgcgtcgcggctgccgcgtgcattactgcttctttaacctcggcggcgcggcgcatgaaattggcgtgcgtcaggtggcgcattatctgtggaaccgctttggcagctcccaccgcgtgcgttttgtcgctattaatttcgaaccggtcgtcggggaaattctcgagaaaatcgacgacggtcagatgggcgttatcctcaaacgtatgatggtgcgtgccgcatctaaagtggctgaacgttacggcgtacaggcgctggtcaccggcgaagcgctcggccaggtgtccagccagacgctgaccaacctgcgcctgattgataacgtctccgacacgctgatcctgcgtccgctgatctcttacgacaaagagcacatcatcaacctggcccgccagattggcaccgaagactttgctcgcacgatgccggaatattgtggtgtgatctccaaaagcccgacggtgaaagcagttaaaagcaagattgaagcggaagaagagaagttcgacttcagcattctcgataaagtggttgaggaagcgaataacgttgatatccgcgaaatcgcccagcagaccgagcaggaagtggtggaagtggaaaccgtcaatggcttcggcccgaacgacgtgatcctcgatatccgttctatcgatgaacaggaagataagccactgaaagtcgaagggattgatgtggtttctctgccgttctataaactgagcaccaaatttggcgatctcgaccagaacaaaacctggctgctgtggtgtgagcgcggggtgatgagccgtctgcaggcgctctatctgcgcgagcagggctttaacaatgtgaaggtatatcgcccgtaatttgtggtttttacgtcgcatctggtcagatgcgacgtttgccgcatccgacattactcgtaataattataaatccctgccgccatcaccagttgacttgccacttcatgggctttttcacgcccaaccaacaggtcgataattttcagaccaaagtcgatagctgtacccggcccctggctggtcagcaattttacccgtgcatcccagacgacgcgcttgtccagccattgttcggcgggaattttgtctttcagcgtcgggaagccggtcatattaccaatcgggaagatatcgtgcggcaccagcacggtggctggcgcggcgcaaatagccgcgacgatacgcccggaacggtggaactgtttaacggtttcaaccagcagagtgctatcgcgaaaacactccgcgcctttaatgccaccaggcagcacgatcacgtcatattcgccatcagccacttcgaccagcggcgcatccgccagcagcttcacgccgcggctgcaggtaatcgccaggttaccatcgctggcgacgctggcagtggtgactttgataccgccgcgaaccagcagatcgatagtggtgacggcttcagtctcttcactaccaggggcgaggcaaaccagtgcgcttgcgctcatattcactctcctttctttttttaattaccaggggcgaggcaaaccagtgccgatgcgctcatattcactctcctttctttttaccatttcaaacaggcgggtgttttccggtacggcaatcccatgcgcgcgggcgcggcgtaagagaaaaccattgatatagtcgatttcagtgtggcgcagcgcgcggatatcctgcaacatgctgctgatattttccgctgtggcatcaatcacctgcatcacgtaatcacgcaaatcttctgcactagtatgatgcccttcgcgttcgatcaccgccgcgacttcttcgcatatctgcataatttcttgcggatgatgacgtaattcaccgttcgggcaattccagatggcagtcagtggattaatcacgcagttgactgccagcttgcgccacagctcggcgcgaatattgttatgccaggcaacgtcaggcaacacggtttgcaaaatatccgccagataactgtaatccccgtcctgttgccgtgccgggccaatatgcgtgataccgtttgccacatgaataatgacattgccgtcgcggcgggctgcatgggtggtggtgcccatcagtaatggctgctgaatgttttgcaactcttcgatggtgcccatgccgttgtgaattaacagtattggcgtagttacaggcagtgtggacgcgaggcttttgacggcatcggaaacctgccatgctttcagcgtcaccaggagcagatcgctggtggcgagaaaatcgggatcgttggcggtcaggctttcgttaaatatgctaccatctgtctcaaccagattcacgctacaataaggttgcggtacgcgcagccagccctgaacttcatgaccctgtttgcaaagtgctgtaagccataattgccctaaggcaccgcatcccaatacggtaattttcattgttcctcctcacccgcaaccactccgggtgttcaataaggctatcccttaattgtgcatgctgttgcgactatgcacaattaagggatacgtcctggtgcaggactgtcggttatttaactttgcgggtattatgcttcgcatcaaaaatgaagggagaggaaaagatgccatctttcgatattgtctctgaagttgatcttcaggaagcacgtaacgcggtcgataacgcgagccgcgaagtggagtcccgttttgacttccgtaacgttgaagccagttttgagctgaacgacgccagcaaaaccatcaaagtgttgagcgagtccgatttccaggtcaatcagttgctggatattctgcgtgccaagctgctgaagcgcggcattgaaggcagtagcctggatgtaccggagaatatcgttcatagcggtaaaacctggtttgtggaagcgaaactgaaacagggcattgagagcgcgacccagaagaaaatcgtcaagatgatcaaagacagcaaactgaaagtgcaggcgcaaattcagggcgatgaaatccgcgtaacgggcaaatctcgtgatgatttgcaggctgtcatggcgatggtacgtggtggcgatctcggtcagccgttccagttcaaaaacttccgcgattaatcgcgactatgtgcgttttgttcatgtcagatgcggcatgaacgcctgattcggcctacaaaggtttgtaattcagaaactttgtaggcctgataagcgtagcgcagcaggcaattcgccgcgttttttatgcctgacgaattgcctgttctatctcaaagcgattcgtcactttgctgtcgattttcacataagcactatgttcttcttctgcaatcaacacttctttgatgccttcagtttctagcaaacgcacttttaacgcctcgtttgcggcaatgttcgccgggatttcaatgcgcaaactgctgacatacggcggttctttcatggtactggcgactgtcagccacactgcggccagcattgcgccagcgagaaataccccctgaccgtcaaacatgccgttaatccagccgcccaggctaccgccaatcgccacgccaagaaactggctggtggagtaaacacccatcgccgtacctttgtaacctgctgggctctctttactgataagactgggcaggagggcttccatcaaattaaacgccacaaagaaaagctgcacgccgaccaccagttgccagaactgcgtttgcgcgttccacaacacaatttccgcaaccacgatcaacccgacgcagaagacaaagacttgcttcattttgcgcttaacttcagcgtagataatgaaaggcacgacgctgccaaaggcgattagcattgtcgccagatagaccttccagtgttcagccgccgggaaccctgcatcagccagttgtccgggcagggcaacaaacgtgctcatcagcaaaatatgcagacacataatgccaaagttgagtttcagcagccgcggttccgccagcactttactgaaactgcctttcaccattccggactcacgattaagtacgtgagtgctactgttgggcacaacccaaatggtcaacgcaatgccggtcgttgccagaatagcgatcatccagaacagcgcgtgcagcccaagtttgtgagtgatgatcgggccaagcaccatcgcaatggcaaaggtaatgccaaagctcacgccgataaacgccatcgctttggtgcggttttgttcgcgcgtgagatcggaaagcagcgccataacggcggcggcaattgctccagagccttgtagcgcccggcccagaataattccccagatggagtcggaaagcgcagcgataacgctaccggcggcaaacaccgccagcccaccgacaattaatggtttgcgaccaatgcggtcggaaagcaggccaaacggaatctgaaaaacggcctgagtcagaccataaataccaatggcaataccgattaatgcttcgctggcaccttgcagagccatgccgtacgtggtcagaaccggcagaaccataaacatgcccagcatgcgcaagctgaatacggtccctaaaccccaggtcgcgcgcctctcacctggcgtcattttataatcgttcattaccacctctgttttaaattcgcgactagtgtaaagcggcaaacgaatggggtaaacatgcggattttttagtaaatatttcgagagggatatgtttctaatgctaagaaaaaaggtgccgtagcacctttttaatagagaggttttgttaccacacagcagccagcagcgtatggctgtccggtaccataaaatcaacggacatcatcacgctgagggcagtgatggcgatgatagagaagccgaacagcttgcgcgcccagattctgtcatcagcaactttataaccgcgcagagccatacctaaccaccagacgctaaccgccgcggcgaccaccagatatttatacccagcgtaaccgccaagagagagcatcagcgtggcaacggcaaaggcgatgatatacagcgtgatgtgattcttcgccacgctaatgccttttaccactggcaataccggaatgtttgccgcctggtaatccttaaagcggaaaatggcgatggcataggagtgaggcatctgccacaggctgaagatagccagcaggatcgctgcgccgctatcgaactcaccggttaccgcacagtagccgatcaccggcggcgcagcgccggagaggctaccaatcaacgtgccgtagacagagtggcgtttcatgtacaggctataaacgccgacataaaccacaaagcccatcacccccagccagcaggccagcggattcgcgccaaaccacagcagcataaagccagcaatacccagcaacgtggcgtacaccaggctgacagcaggagagatcaggcctttcaccagcacccgattcttcgtcctttccatctttctgtcgatatccctgtcgatgtagttgttaaacacacaaccgctcgccacaaccagactcaccccaaccagcgtgtagataaacaggggataatcaatgctgcccttactggccagcaggaatcccccaatcacgctgatcaggttgccaaagatgatgcctggtttcgttacttgcaggtattgcttaaacatcataaccgccgctcttagtgcatcatcatgttgtagttgaggttccacataatccagatggagcctacaaccaggatagcgatgattagcacggtgaagacaaacgccgtcatgttccagccttcatcacttttggtattcatgtgcaggaagcacaccagatgcaccagaacctgtaccactgccattgccaggattgttcccagaattacggccggagaggcagctcctgtcatcaccatccagaacggaatcaccgtcagaatgatgctcaggataaagcctgtcatgtaggtttttacgctgccatgggacgcgccgctgtgatcggtagaatgactcattacatcgccccccatcagataaacaacagtgaacacacagatccaaaccacatccaggaagtgccagaacaggctcaggcacatgatgcgggtacggttagtgctggtcaggccgcgacgggcgatttgcaccatcagcaccgccatccagataagaccagaagtgacgtgcagaccgtgcgtgccgaccagcgcaaagaacgcactcaggaagccgctgcgatccggacccatgccgttaacaatcaggtgatggaattcatagatttccatcccgataaatccggcaccaaacaaccaggtcaacgccagccaggagataacctggcttttgttgtttttgtacatggcgatagccgccatgccgtaggtgatggagctgaacaacagcaagaaagtttcaaccagaacgaacggcagttcgaaaatgtccttacctgtcgggccgcctgcggtgccgttcaccagaacggcataggtagcaaacaagatagagaacagaatgcagtcgctcatcaggtagatccaaaatccgaagattttggttccgcctgcatcgtggtgcccgtgttcgtgcgcgtgggcagtcgcgtgcgtcaaagtatcagttgccatttttcagccctgccttagtaatctcatcgaaatgctggttttccagtttttcgatttctgccaccggcacgtagtaatccacgtcctcgtcgaagcttttcacgatccaggtgatgatcatgcctgcgaagccaacaatcgccagccaccagatatgccagatcatggcgaaaccgaagatggtggagaaagctgcaatgacgatacctgcaccgctgtttttcggcatatgaatttcttcatagtggtcaggctttttatacgcttcgcctttctctttcatttcccagaatgcatcacgttcgtgaacgtgcggcactacggcaaagttatagaacggaggcggggaagaggttgcccactccagcgtacggccaccccacgggtcgccagtcaggtcacggttctggtcgcggtcgcgaatagaaacgtacatctgaataacgaggcagagaatacccagcgcaatcagtactgcaccgctggctgcaatcatcagcatggtgtggaactgcgggtcaatctgctggctcaaacgacgggtcatgcccatgaagcccagcgcatacagtggcataaaggcaacgaagaagccgatgatccagaaccagaacgcgcgtttaccccaggtttcgttcagtttgaaaccgaacgctttaggccaccagtaggtcatccctgcgaagcagccgaagaccacgccgccgatgatcacgttatggaagtgcgcaatcaggaacaggctgttatgcagaacgaagtccgcgcccggtacggccagcagcacgccagtcatcccgcccacgctgaaggtgacgataaaaccgatggtccacagcatcgcagaatggaacacgatgcggccctgatacatggtgaacagccagttgaagatcttcaccccggtcgggatggcgataatcattgtggtgataccaaagaaggcgtttacgttcgcgcccgcacccatcgtaaagaagtggtgcagccaaacgatgaagctcagcacggtgatacagacggttgcccataccaggctggtataaccaaacagacgtttacggctgaaggttgccgcaatttcggagaacacaccgaaaacaggcaggatcaggatgtaaacttccgggtggccccaggcccaaatcaggttgatgtacatcatcatgttgccacccatatcgttggtaaagaaatgggtgcccagatagcgatccagggtcaacaacgcgacggtaaccgtcagaattgggaaggaagcaataatcagtacgttcgcgcacagacttgcccaggtaaatactggcatcttgaacatggtcatgcccggtgcgcgcatcttcagaatggtaacgaagaagttgataccggtaagcgtcgtacctataccggatagctggagactccatatccagtaatcgacaccgactcccggactgtactctattccgcttagcggtggataggccagccagccggtctgcgcaaattcgcccacgccgagagaaacgttaaccagaatcacaccaacaacggtaaaccagaagcttaagttgttgaggaacgggaacgcaacgtcacgcgcgccgatctgcagcggaaccaccaggttcatcagaccgataacgaaaggcatcgccacgaagaagatcataatcacgccgtgcgcggtaaagatctgatcgtagtggtgaggtggcaggaagcccgcttcgcccgcgctggcaagagcctgctggctacgcatcataatggcgtcagcaaaaccacgcagcaacatcacaatcgccacgatgatatacatgataccgaggcgtttatggtcgacggaggtcagccactctttccacaggtaggtccacttaccgaagtaagtgatcaggccaacgagcgccagacctcccaaaataatgccagcgatcgtaaccatgacgataggttcatggaacgggactgcatcaagacttaattttccgaacatctttattcttcctcaacccctttaatgggcggattccgcgtggctcatgtccatgccttccataccttcgtgtgcgctgtgctcaccttctggctgggtcatgtccatgctcttaccgtgagccataaacttgttaattacatcggcaaacaagtctggtttcacgttggagaaatattccacctggttgtattcgctaggcgcggccagtttttcgaacgcagccatgtcagacatggtgttcgggctctgcttcgcttttgcgacccactggtcgaatgcggcgcgatccggtgttgcaatagctttgaacttcatgccactgaagcccgggccgctgtagctggcggagataccgtcataagtgccgggttcgttggcgatcagatgcaggcgagtctgcataccggccatggcataaatctggctacccagacgcggaatgaagaaggagttcatcacggagttggaggtcactttgaagtacaccggagtgttcgccgggaaagcgatttcattcacggtagcaatgccctgttccgggtagatgaagaaccatttccagtccatggaaaccacttcgatggtaatgggcttctcgtcgtgtgccagcggcttgctaggctcaagagcgtgagtggttttccaggtcagtactgcaaggaagatgatgattaagataggtaccgtccagaccacagcttccactttattggagtgactccagttcgggctgtacttagcatctttattgctcgcacggtacttccaggcgaaaccaacagccatcaagattgcgggaataacgacaatcaacatcaggccaaatgccgtcagtatcagactacgttgctccagaccaatctgtcctttgggatctaacagcgcagaattacagccactgagcaatacagtgcctgcaaataaactcaaccatcccaaacttttattgtatttcctgagtctcatttaacgacctcaattccacgggatctggtggcgtttaaagtgtgtgggcattttacgggaaggttacattactgtaaacatgattaaattcctgttacttggatttggctgccaggtcacatatgttgcaaaacatatcaggttgattttaagaagctgttgcaaaagggcgttataacaaaaggggagtgctgaaggagtctgggcgggcaattggtataaccaatgtgaaataaaacaattatttaacaaataattatcattagagtgacaactgggtgatgagaaaataaagactcattagctgaatcgtgtaagaaaaatagaatttataaatggcgccaataatttccaaacgctaagccgcacaaaagaacaaatattaataagcgatactgatgtttatttagccgtaataattacggcgagtgattactacagctaaataatatttacagattacgtcagatgcgtttttcgtagcgccagataatccagcaaaccaccaagcacgacgccagaaagggcgactaaaaccccgacttccagcagagcaggcaggaaagagaagtgcgtcaaatccagcgcgtccatcgtcaatagcagtaaccacacggccaacaggctgacgcccgccgccagtgtccacatggcaaaggcataacctgccggatatgcggtacgggagataaagttgtcatttactcgtgtatattcaagcgtctggcggcaaaccagcagcaaaataagccctggtacggcagcggcgacggagaatagatagaatgtgctccagccgtgtgcttcaacaaaccaacccgccacggggccgacataaactcgccctacagcagaaagcgcactgagcagggcaaattgagtagcggaaaaactcttattacatagcgtcattaacagcgcgacaaaggcacttgtgcccatcccgccacagaggttttcgaaaaagacggctgcgcccatgctgtagagatgcttatcagtaatgctcagcagccagtaaccggcgttagacgcaccttgtaaaatgccgaaaatcagcagtgcccggaacagactcaggcgctgcatcaaaatcccaccgtacaatgcgccaacaatggtcgctagtaagccaagcgttttgttaaccacgcctacttcacccgcatcaaacccgacgccgcgaatcaaaaacgtggttgtcaggctcatggcgaatgcgtcgcccagcttatacagcacgataagaagcaaaataagccaggcattattgcgaccaaagaaatctcgcagaggtgcaacaaccgcttgttccagcgttttgggcacaggaatggtgtcggttggttctggtgcaagcaacgtcgcgataatacaggggatcaacagtgccgccattaaccagtacatgccctgccagcccagccatttatctgccagccacagggctaggccgccggaaaccagcatccctaaacggtaacccagcacgctgattgccgcgcccgcaccacgttcttctgccggaagcacatcggttttccacgcatcgaagactatatcctgggaagcagagcaaaaagcgatcaccactgccagcgccgccatccagcggagttgggtgcctggttcgagaaaacccatcgccgcaatggcgactaataacaggatttgcgtggcgagcagccaaccgcgccgccgcccaaaaaatggaggcgtgtagcggtccatcagcggactccagaggaatttaaaaacgtaagcctggcctaccagagagaagaaaccaatggttttgagatcgatattctcgaccgtcatccaggcctgtaaggtaccggatgtcagggcgagcggtagcccggaagcaaaacccaggatcagcaatatggcactacgcggctgttgaaaaatacgtaaatattgactggacatgggcgtctacaggcccggcttgcaccgggccagagggcagaaattaacgcgcgttctgcttgatgaattcgtggatgctggtgtcctgagacatatcagcgatggtatcggtcagcacactgttaaccgcatcggcgatatttttgttggaggcctggaacgcaccttcaacgttgtagctggcacgatagtttttggtcattttgttgccattctgcgcggtagcgatgatggcgatatccgctttggtcgcgatgttgtagcgcacgttgccctgggacacgtcagcatacagttggctaacgatgatttgcagattaaccgggccattcggaccaaccatgtaaccacgcgcggtcatctgtttttccagcacttcttgcagcaggaaacgcagatcgcgggaggcggtcagggtaacgatttgattatcgcgggtgacttttgccagcgcctgatcggtacgctgatcggcaccattaatgcttacggtgacgcccatcaggcttggatcctgctgtggcagtgtaatcgtcggggaaacttcaatagttgttggcggttttgcgcatcctgcaagcataaacagagcaactaacgggaagaggatttttttgaacatgttcgggctctcagagactcttaagcgtgtttggtaaaaattcccgccatcataacattgccaacggcgaggggaagtgggtaaggcatgtaaattcatcatgttgacgaaataatcgcccctggtaaaagaaacactgatgcgaggcctgtgtttcaatctttaaatcagtaaacttcatacgcttgacggaaaaaccaggacgaaacctaaatatttgttgttaagctgcaatggaaacggtaaaagcggctagtatttaaagggatggatgacatctcagcgttgtcggaggagatatttcatgatgatacgtgagcggatagaagaaaaattaagggcggcgttccaacccgtattcctcgaagtagtggatgaaagctatcgtcacaatgtcccagccggctctgaaagccattttaaagttgtgctggtcagcgatcgttttacgggtgaacgttttctgaatcgtcatcgaatgatttacagtactttagcggaggaactctctactaccgttcatgcgctggctctgcatacttacactattaaggagtgggaagggttgcaggacaccgtctttgcctctcctccctgtcgtggagcaggaagcatcgcgtaaaaacgcatttgcaactgtcggcgcttttccagtatgttgctaaagattttatgaaaaacggcctgcgggccgttttgttttgtctggattttgcgctttttgcccagcattcagacgaaaattgcccgggaattgtgaaaaaatacgcgacagcgcgcaataaccgttctcgactcataaaagtgatgccgctataatgccgcgtcctatttgaatgctttcgggatgattctggtaacagggaatgtgattgattataagaacatcccggttccgcgaagccaacaacctgtgcttgcggggtaagagttgaccgagcactgtgattttttgaggtaacaagatgcaagttagtgttgaaaccactcaaggccttggccgccgtgtaacgattactatcgctgctgacagcatcgagaccgctgttaaaagcgagctggtcaacgttgcgaaaaaagtacgtattgacggcttccgcaaaggcaaagtgccaatgaatatcgttgctcagcgttatggcgcgtctgtacgccaggacgttctgggtgacctgatgagccgtaacttcattgacgccatcattaaagaaaaaatcaatccggctggcgcaccgacttatgttccgggcgaatacaagctgggtgaagacttcacttactctgtagagtttgaagtttatccggaagttgaactgcagggtctggaagcgatcgaagttgaaaaaccgatcgttgaagtgaccgacgctgacgttgacggcatgctggatactctgcgtaaacagcaggcgacctggaaagaaaaagacggcgctgttgaagcagaagaccgcgtaaccatcgacttcaccggttctgtagacggcgaagagttcgaaggcggtaaagcgtctgatttcgtactggcgatgggccagggtcgtatgatcccgggctttgaagacggtatcaaaggccacaaagctggcgaagagttcaccatcgacgtgaccttcccggaagaataccacgcagaaaacctgaaaggtaaagcagcgaaattcgctatcaacctgaagaaagttgaagagcgtgaactgccggaactgactgcagaattcatcaaacgtttcggcgttgaagatggttccgtagaaggtctgcgcgctgaagtgcgtaaaaacatggagcgcgagctgaagagcgccatccgtaaccgcgttaagtctcaggcgatcgaaggtctggtaaaagctaacgacatcgacgtaccggctgcgctgatcgacagcgaaatcgacgttctgcgtcgccaggctgcacagcgtttcggtggcaacgaaaaacaagctctggaactgccgcgcgaactgttcgaagaacaggctaaacgccgcgtagttgttggcctgctgctgggcgaagttatccgcaccaacgagctgaaagctgacgaagagcgcgtgaaaggcctgatcgaagagatggcttctgcgtacgaagatccgaaagaagttatcgagttctacagcaaaaacaaagaactgatggacaacatgcgcaatgttgccctggaagaacaggctgttgaagctgtactggcgaaagcgaaagtgactgaaaaagaaaccactttcaacgagctgatgaaccagcaggcgtaatttacgcagcataacgcgctaaattcgcacaaaggcccgtcaccgccaggtggtgggcttttttttgtcatgaattttgcatggaaccgtgcgaaaagcctctttcggtgttagcgtaacaacaaaagattgttatgcttgaaatatggtgatgccgtacccataacacagggactagctgataatccgtccataaggttacaatcggtacagcaggttttttcaattttatccaggagacggaaatgagttacagcggcgaacgagataactttgcaccccatatggcgctggtgccgatggtcattgaacagaccagtcgcggtgagcgctcttttgatatctattctcgtctacttaaggaacgcgtcatttttctgactggccaggttgaagaccacatggctaacctgattgtggcgcagatgctgttcctggaagcggaaaacccagaaaaagatatctatctgtacattaactccccaggcggggtgatcactgccgggatgtctatctatgacaccatgcagtttatcaagcctgatgtcagcaccatctgtatgggccaggcggccagcatgggcgctttcttgctgaccgcaggggcaaaaggtaaacgtttttgcctgccgaatagccgcgtgatgattcaccaaccgttgggcggctaccagggccaggcgaccgatatcgaaattcatgcccgtgaaattctgaaagttaaagggcgcatgaatgaacttatggcgcttcatacgggtcaaagtttagaacagattgaacgtgataccgagcgcgatcgcttcctttccgcccctgaagcggtggaatacggtctggtcgatagcattctgacccatcgtaattgatgccagaggcgcaactgtgccgctatacttatccagggcggcacaacgctgtaagcggcttgcgcctgagaatggcatttgcgtcgtcgtgtgcggcacaaagaacaaagaagaggttttgacccatgacagataaacgcaaagatggcagtggcaaattgctgtattgctctttttgcggcaaaagccagcatgaagtgcgcaagctgattgccggtccatccgtgtatatctgcgacgaatgtgttgatttatgtaacgacatcattcgcgaagagattaaagaagttgcaccgcatcgtgaacgcagtgcgctaccgacgccgcatgaaattcgcaaccacctggacgattacgttatcggccaggaacaggcgaaaaaagtgctggcggtcgcggtatacaaccattacaaacgtctgcgcaacggcgataccagcaatggcgtcgagttgggcaaaagtaacattctgctgatcggtccgaccggttccggtaaaacgctgctggctgaaacgctggcgcgcctgctggatgttccgttcaccatggccgacgcgactacactgaccgaagccggttatgtgggtgaagacgttgaaaacatcattcagaagctgttgcagaaatgcgactacgatgtccagaaagcacagcgtggtattgtctacatcgatgaaatcgacaagatttctcgtaagagtgacaacccgtccattacccgagacgtttccggtgaaggcgtacagcaggcactgttgaaactgatcgaaggtacggtagctgctgttccaccgcaaggtgggcgtaaacatccgcagcaggaattcttgcaggttgatacctctaagatcctgtttatttgtggcggtgcgtttgccggtctggataaagtgatttcccaccgtgtagaaaccggctccggcattggttttggcgcgacggtaaaagcgaagtccgacaaagcaagcgaaggcgagctgctggcgcaggttgaaccggaagatctgatcaagtttggtcttatccctgagtttattggtcgtctgccggttgtcgcaacgttgaatgaactgagcgaagaagctctgattcagatcctcaaagagccgaaaaacgccctgaccaagcagtatcaggcgctgtttaatctggaaggcgtggatctggaattccgtgacgaggcgctggatgctatcgctaagaaagcgatggcgcgtaaaaccggtgcccgtggcctgcgttccatcgtagaagccgcactgctcgataccatgtacgatctgccgtccatggaagacgtcgaaaaagtggttatcgacgagagcgtaattgatggtcaaagcaaaccgttgctgatttatggcaagccggaagcgcaacaggcatctggtgaataattaaccattcccatacaattagttaaccaaaaaggggggattttatctcccctttaatttttcctctattctcggcgttgaatgtgggggaaacatccccatatactgacgtacatgttaatagatggcgtgaagcacagtcgtgtcatctgattacctggcggaaattaaactaagagagagctctatgaatcctgagcgttctgaacgcattgaaatccccgtattgccgctgcgcgatgtggtggtttatccgcacatggtcatccccttatttgtcgggcgggaaaaatctatccgttgtctggaagcggcgatggaccatgataaaaaaattatgctggtcgcgcagaaagaagctagtacggatgagccgggtgtaaacgatcttttcaccgtcgggaccgtggcctctatattgcagatgctgaaactgcctgacggcaccgtcaaagtgctggtcgaggggttacagcgcgcgcgtatttctgcgctctctgacaatggcgaacacttttctgcgaaggcggagtatctggagagcccgaccattgatgagcgggaacaggaagtgctggtgcgtactgcaatcagccagttcgaaggctacatcaagctgaacaaaaaaatcccaccagaagtgctgacgagcctgaatagcatcgacgatccggcgcgtctggcggataccattgctgcacatatgccgctgaaactggctgacaaacagtctgttctggagatgtccgacgttaacgaacgtctggaatatctgatggcaatgatggaaagcgaaatcgatctgctgcaggttgagaaacgcattcgcaaccgcgttaaaaagcagatggagaaatcccagcgtgagtactatctgaacgagcaaatgaaagctattcagaaagaactcggtgaaatggacgacgcgccggacgaaaacgaagccctgaagcgcaaaatcgacgcggcgaagatgccgaaagaggcaaaagagaaagcggaagcagagttgcagaagctgaaaatgatgtctccgatgagcgcagaagcgaccgtagtgcgtggttatatcgactggatggtacaggtgccgtggaatgcgcgtagcaaggtcaaaaaagacctgcgtcaggcgcaggaaatccttgataccgaccattatggtctggagcgcgtgaaagatcgaatccttgagtatcttgcggttcaaagccgtgtcaacaaaatcaagggaccgatcctctgcctggtagggccgccgggggtaggtaaaacctctcttggtcagtccattgccaaagccaccgggcgtaaatatgtccgtatggcgctgggcggcgtgcgtgatgaagcggaaatccgtggtcaccgccgtacttacatcggttctatgccgggtaaactgatccagaaaatggcgaaagtgggcgtgaaaaacccgctgttcctgctcgatgagatcgacaaaatgtcttctgacatgcgtggcgatccggcctctgcactgcttgaagtgctggaaccagagcagaacgtagcgttcagcgaccactacctggaagtggattacgatctcagcgacgtgatgtttgtcgcgacgagcaactccatgaacattccggcaccgctgctggatcgtatggaagtgattcgcctctccggttataccgaagatgaaaaactgaacatcgccaaacgtcacctgctgccgaagcagattgaacgtaatgcactgaaaaaaggtgagctgaccgtcgacgatagcgccattatcggcattattcgttactacacccgtgaggcgggcgtgcgtggtctggagcgtgaaatctccaaactgtgtcgcaaagcggttaagcagttactgctcgataagagtttaaaacatatcgaaattaacggcgataacctgcatgactatctcggtgttcagcgtttcgactatggtcgcgcggataacgaaaaccgtgtcggtcaggtaaccggtctggcgtggacggaagtgggcggtgacttgctgaccattgaaaccgcatgtgttccgggtaaaggcaaactgacctataccggtagcctcggcgaagtgatgcaggagtccattcaggcggcgttaacggtggttcgtgcgcgtgcggaaaaactggggatcaaccctgatttttacgaaaaacgtgacatccacgtccacgtaccggaaggtgcgacgccgaaagatggtccgagtgccggtattgctatgtgcaccgcgctggtttcttgcctgaccggtaacccggttcgtgccgatgtggcaatgaccggtgagatcactctgcgtggtcaggtactgccgatcggtggtttgaaagaaaaactcctggcagcgcatcgcggcgggattaaaacagtgctaattccgttcgaaaataaacgcgatctggaagagattcctgacaacgtaattgccgatctggacattcatcctgtgaagcgcattgaggaagttctgactctggcgctgcaaaatgaaccgtctggtatgcaggttgtgactgcaaaataatgacctcgcgcaaaatgcactaataaaaacagggctggcaggctaattcgggcttgccagcctttttttgtctcgctaagttagatggcggatcgggcttgcccttattaaggggtgttgtaaggggatggctggcctgatataactgctgcgcgttcgtaccttgaaggattcaagtgcgatataaattataaagaggaagagaagagtgaataaatctcaattgatcgacaagattgctgcaggggctgatatctctaaagctgcggctggccgtgcgttagatgctattattgcttccgtaactgaatctctgaaagaaggggatgatgtagcactggtaggttttggtacttttgccgttaaagagcgtgctgcccgtactggccgcaacccgcagaccggtaaagagatcaccatcgctgctgctaaagtaccgagcttccgtgcaggtaaagcactgaaagacgcggtaaactaagcgttgtccccagtggggatgtgacgaagttcaagggcgcatctactgatgtgccttttttatttgtattcggtgactttctgcgtcttgtgggctgacaattgcccccgtttcttgtcacaataggcctttgcgcgcatcgatacgttgcgtgaggtacacagtcatctacagcggagtgttgttacaccatgatggacagcttacgcacggctgcaaacagtctcgtgctcaagattattttcggtatcattatcgtgagcttcatattgaccggcgtgagtggttacctgattggcggaggcaataactacgccgcaaaagtgaatgaccaggaaatcagccgtgggcaattcgagaacgccttcaacagcgagcgtaatcgcatgcagcaacagctgggcgatcaatactccgagctggcagcgaacgaaggctatatgaaaaccctgcgtcaacaggtgctgaatcgtctgatcgacgaggcgctgctggatcagtacgcacgtgagctgaaactgggtatcagcgatgagcaggttaaacaggcgattttcgcgaccccagccttccaggttgacggcaaatttgataacagccgctataacggtatcctcaaccagatggggatgaccgccgatcagtacgcccaggcgctgcgtaaccagctcactacccaacagctgattaacggcgttgccggtaccgattttatgctgaaaggtgaaaccgacgagctggcggcactggtcgcgcaacaacgcgtggtgcgtgaggcgactatcgatgttaacgcgctggcggcgaagcagcctgtgaccgaacaggagattgccagctactacgaacaaaacaaaaacaatttcatgacgccggaacaattccgcgtgagttacatcaagctggatgccgcaacgatgcagcaaccggttagcgatgcggatatccagagctactacgaccagcatcaggatcaattcacccagccgcagcgtacccgctacagcatcatccagaccaaaactgaagatgaagcgaaagcggtacttgatgagctgaataaaggcggtgattttgctgcattagccaaagaaaaatctgccgatattatctctgctcgtaacggcggcgatatgggttggttagaagatgccactatcccggacgaactgaaaaatgctggtctgaaagaaaaaggccaactgtctggtgtcatcaaatctagcgtcggtttcctgattgtacgtctggacgacattcagccagcgaaagtgaaaagcttagacgaagtacgtgacgacattgcggcgaaagtgaaacacgaaaaagccctcgatgcgtactacgcgctgcagcagaaagtgagcgatgcggcaagcaacgacaccgagtctctggccggtgcagagcaagctgccggcgttaaagccactcagacgggttggttcagcaaagataacctgccggaagagttgaacttcaagccggttgccgacgctatctttaacggcggtctggtaggtgaaaacggcgcgccgggcatcaactctgacatcatcaccgtagacggcgaccgcgcattcgtgctgcgcatcagcgagcacaaaccggaagcggtgaaaccgttggcagatgttcaggaacaagttaaggcattggttcagcacaacaaagctgaacaacaggcgaaagtggatgctgagaaactgctggttgatttgaaagccggcaaaggtgcggaagctatgcaggctgccggtctgaaatttggcgagccgaaaaccttaagccgttccggtcgtgacccgattagccaggcggcgtttgcactgccactgccagcgaaagacaaaccgagctacggtatggcgaccgatatgcaaggtaatgtggttctgctggcgctggatgaagtgaaacaaggtagtatgccggaagatcagaaaaaagcgatggtgcagggtatcacccagaacaacgcacaaatcgtctttgaagctctgatgagtaacctgcgtaaagaggcgaaaatcaaaattggcgatgcgctggaacagcaataatcctgaagccgcctcgcaaaaaaatgcgttgcagctgtaacaagaaaaggtcgctttcgcggccttttccatttctgaacattgccatttgtttactgttttcactgccgttaaggtgattccactgttaacaaacaaggagaaaacagtatgaaacacggaattaaagcactgctcattaccctgcccctggcctgtgccggaatgtctcatagcgcgctggcggcagcttctgtggcgaaaccgacggcggtagaaaccaaagcggaagctcctgcagcacaaagtaaagcagcagtaccggcgaaagccagtgacgaagaaggcacccgggtcagcattaataatgccagcgcggaagagctagcccgcgcgatgaatggcgttggcctgaagaaagcgcaggcgattgtcagttatcgcgaagagtacggtccgtttaaaactgtggaggatctaaagcaggtgccggggatgggcaatagcctggtggaacgtaatctggcggtattaaccctgtaattaatttgcatagtggcaattttttgccagactgaagaggtcataccagttatgacctctgtacttataacaacaacgtaaggttattgcgctatgcaaacacaaatcaaagttcgtggatatcatctcgacgtttaccagcacgtcaacaacgcccgctaccttgaatttctcgaagaagcccgctgggatgggttggaaaatagcgacagttttcagtggatgacggcccataacatcgccttcgtcgtggtcaatatcaatattaactatcgtcgcccagcggtattaagtgacctgttaactattaccagtcagttgcagcaattaaacggtaaaagcggcatcttaagccaggtcattacactggagccggaagggcaggtggtagcggatgcgcttattacgtttgtttgtattgatcttaaaacgcagaaagcattagctctggaaggggaattgcgcgaaaagctggagcagatggttaagtaaacgttttgtggtgccggatgctcaagccgcatccggcgacacccggaataattacctcaacccggttttctgcttcatcgctgccatcaccgtcggtttatcggccagataatgattcaaaccgttggcgcgtaaattacatgccgcacaatgaccgcaaccgtcgcctttaaagccgttatagcaggtcaacgtttcgttacggactaaatccagtttgccgtaataatctgccagcgcccaggtttccgctttatcaatccacatcagcggcgtttcaaaacgaatatctttcgccatgcccaaactgacggcatggtttagtgctttcacaaactcatcgcggcaatccgggtagccggagaaatccgtttcgcagacgccagtaattacggcttctgcttttacctgatacgcatatattgccgccagcgtcaggaacaaaatattacgccctgggacaaacgtattcgggataccatcggcttcaggttcataatcaggcaccggaatgctgtcacgcgtcaggctactgaccgccagctcgttgagcagggtgacatccagcaccttatgcgcgcgtgcccccagtttcagcgccagttcgcgtgccacgtcgatttctgcgcgatgccgctgaccgtaatcgaacgtcacgcaatggacttcatcatattgttgtaatgcctgcaccagacaggtggtggaatcctgacctccactgaacacaacgacagcacgtttcatagataatcctgcttgaacaataaaagcgttatggtaacgcctgcgattaacccggaccagctattcattggcttggcgcgggaagccaggcttcggtaaattcaaaccagccgcgcggtgtcagtcgcacaccgttcacgccgggaggggcactaatgcgatagtgatagttgaacagcggcgtcagcgtcgcatctgtcattaactggctaaaaaccgctttcagggcattaaatcggttttcttcatcaggcattatttgcacggcatccagtgtgctttgtagatgtgcgtatgctggagcgtcgaaaacatgtggccacagcggatcgcagcgcagccattgctccagagtatattccggtgcttcgccaattaatctgtcgcccatcatgaggtctgcgtgtgcctgtagggtcgtgtcgtcccagttttttgcgttatgaaaaataattgtgagttcacagccttccgctgccagtgtcgcctgtaggcgttctgccatggtatgaagttctatcggtaggtgataaaccagcgtcaaggttttcggtagtttgacttcatccggtacctgccaatgcggaatagtccagcctggcagtaatgcatgactggcggtgatcaggttttctccgacttctaacgtttgtaataaaccggattgatgaataatggagatcacttttcgcgcctgccagagggagagtcggggacttttgcgcaacgtcaaatagcaaaaacctaaactgatgccgctactgacctggctgacccgttgcagctcctccggtttgccgatggtgatttgcacgggatgccgacaactggttcccaaatctttttcgaaaagcggcggagttatccagtactcaaccgctttaagcagcggatgacgtaaatggtaataatcatggctttccaggcgcaccagctctgctgtgaattgtgttaagcgaaaaggacccgtgccgatcagtgggaattgcggatgcgccagatggctgcaatagctcgccagccggtgcgcaagccagtaatcagggcgatgtaaaaagaaggtcagacactgcggatgggtgacttcaatacgcttcacgctaataaataattgatccagtgctggcagttgtaacagcatcaataatcgctggtgtaagtgactggcttttactgcatcgccgttatgccagtgtagggtactacgaagataaaagtcccagcgtaacccgtcagtagaggtttcccagtgatgcgctaaatcgccaatcgggcgctgagtattattatcgaagcgggtcaggccggaaaatatctgcccggcgagatgctgctcggcacggccgggcaaaaagcctggttgtagcggttcgagcgggcgatagtagggaatacgcaacgtgggtgtatcgttttgccattgtccgcccataaacggctgtaacagagtgcgcagctcacctggggccagttgcgccagctccagcacatcttgctgctttccggtttccagtgcctgttccatcatcgcattgcgtaggctttccggcgtgaccagaaagcgtaattgtccgcgctttccgcgtccactctgcgcctgccactccagccatcccgcctcctgtgcctgacgcaacagcgtacgaacatggcgttcgctgcaaaaacagcgttcggccagttcgctgacggtgacggtttgcggctttccggcggaaggttgccacagacgttgatactggttaagacggttgagcaatcgcatataaacccggaacaatattatttaactattcactattacttccgtatatatcaggtgatactcaatcaccattaaccgtgtcacagagtggagaaagaaatggctcgtctggcagcatttgatatggatggcactttattgatgcccgaccatcatttaggtgagaaaaccctctctactttggcgcgactgcgtgaacgcgacattaccctcacttttgccacggggcgtcatgcgctggagatgcagcatattctcggggcgctaagcctggatgcgtatttgattaccggcaacggaacgcgcgtgcattctctggaaggtgaacttttacatcgtgatgatttacctgcggatgtcgcggagctggtgctgtatcagcaatgggatacccgagccagcatgcatatcttcaatgacgacggttggtttaccgggaaagagatccctgcgttgttgcaggcatttgtctatagcggttttcgttatcagataatcgatgtcaaaaaaatgccactcggcagcgtcaccaagatctgcttctgtggcgatcacgacgatcttacacgcttgcagatccagctatacgaagcattaggcgagcgtgcacatttgtgtttttccgccacggattgcctcgaagtgctgccggtgggctgcaataaaggcgctgcattgacggtgctgacccaacatttaggtttaagcttgcgcgattgcatggcctttggtgatgcgatgaacgatcgcgaaatgttagtcagcgtcggtagcggatttattatgggcaatgcgatgccgcaactgcgcgcggagctcccgcatttaccggtgattggacattgccgaaatcaggctgtctctcactatttgacgcactggctggactatccacatctaccttattcccccgaataacgagatcccttccagcaccgggcaattgcccggttttttttgcgttgaatttgtcattttgtgccgtggtgtttaaaccgcacagaataaattgtcgtgatttcacctttaaaataaaattaaaagagaaaaaaattctctgtggaagggctatgttagataaaattgaccgtaagctgctggccttactgcagcaggattgcaccctctctttgcaggcactggctgaagccgttaatctgacaaccaccccttgctggaagcgcctgaaacggctggaggacgacggtatccttatcggcaaagtcgccctgctggatccggaaaaaataggcctcggcctgaccgcttttgtgctgataaaaacgcaacatcacagcagcgaatggtattgccgctttgtcacggtggttaccgaaatgccagaagtgctggggttctggcgcatggctggtgaatacgattatctgatgcgcgtccaggttgccgacatgaaacgctacgacgagttttataagcgtctggtaaacagcgtgccggggctgagcgacgtcacttccagcttcgcgatggaacagattaaatacaccacttctttacccatcgaataaatatccagaatcaggtcaggacacaacgcgtgcgattatttgctcaattaagctggtatttccgtcgggaatggcgtcgctatctcggggctgtcgccttgcttgtcattatcgcgatgctgcaactggttccgccaaaagtggttggtattgttgtcgatggcgtgacagaacaacactttactaccgggcagatcctgatgtggatcgccaccatggtgctgattgccgttgtggtttatctcctgcgttacgtctggcgggtattgctgtttggtgcgtcttatcaactggctgttgaactgcgtgaagattattaccgtcagctaagccggcagcatcctgagttttacctgcgtcatcgcaccggtgacctcatggctcgtgcgaccaatgacgtcgatcgcgtcgtgtttgccgccggagaaggggtgctgacgctggtggatagtctggtgatgggctgcgctgtgttgattatgatgtctacgcaaattagctggcagttgaccttattttccctgttgccgatgccagtgatggcgatcatgattaagcgcaacggcgatgctttgcatgaacgctttaagctggcacaggcggcgttttccagtcttaatgaccgcacccaggaaagcctcaccagtatccgcatgatcaaagcctttggtctggaagatcgccagagcgcgttatttgccgcggatgccgaagataccggcaaaaaaaacatgcgggtggcgcgtattgatgctcgtttcgacccgaccatctatatcgcgattggtatggcgaacttgctggcgattggcggcggtagttggatggtggtgcagggcagtttaacgctgggccagctcaccagttttatgatgtatttaggtctgatgatttggccaatgctggcgctggcatggatgtttaacattgtggaacgtggtagtgctgcgtacagccgtattcgcgcgatgctggcggaagcgccggtggtgaacgatggtagcgaacccgtgccggaagggcgtggcgaactggatgtaaatattcaccagttcacgtatccgcagactgaccatcctgcgctggaaaacgtcaatttcgccctgaaacccggtcagatgctgggtatctgcgggccgactggttccggcaaaagtaccctgttgagcctcattcagcgtcatttcgacgtcagcgagggggatattcgctttcatgatattcctctgacgaagttacaactcgatagctggcgtagccgcctggcggtagttagccagacgccattccttttttctgacactgtggcgaataacatcgcgctgggttgcccgaatgccacccagcaagagattgagcatgtcgcgcggttagccagcgtacatgacgatattttgcgtctaccgcaaggttacgatacagaggtgggcgagcgcggtgtgatgctttccggcgggcaaaaacagcgtatctccattgctcgtgcgttattagtcaacgcggaaatcctcatccttgatgatgcgcttagcgcggtggacggacgcactgagcaccagatcctgcataacctgcgtcagtgggggcagggaagaacggtaatcatcagtgcccatcgcctttctgcactgacggaagccagtgaaattattgtgatgcagcacggacatatcgcccagcgtggcaatcatgatgtgctggcacaacaaagcggctggtatcgcgatatgtatcgctatcaacaactggaggcggcgctcgacgacgctccggaaaatcgcgaggaggccgtcgatgcgtaactaaaaatcgcgaggaggccgtcgatgcgtagttttagccaactgtggccgactctcaagcgcctgttagcgtacggtagcccgtggcgtaaaccgctggggattgcggtcctgatgatgtgggttgcggcggcggcagaagtcagtgggccgctgcttatcagctattttatcgacaatatggtagcgaaaaataacctgccgttgaaagtggttgcagggctggctgcggcgtatgttgggctgcaactgtttgccgccgggctacattacgcgcagagcctgctgtttaatcgggcggcagtaggcgtagtgcaacagttgcgtaccgacgtgatggatgctgcgttacgccagccattaagcgagtttgatacccaacccgtcgggcaggtgatttcccgcgtcactaatgacactgaagtgatccgcgatctctacgttaccgtagtggcaactgtcctgcgcagtgccgcgctggtgggcgcgatgctggtggcgatgttcagcctcgactggcgaatggcactggtggcgataatgattttcccggtggtgctggtggtaatggtgatataccagcgttacagcacgccgattgtccgtcgtgtgcgcgcctatttggcggatatcaacgacggctttaacgaaatcatcaatggcatgagcgttatccagcagtttcgtcagcaggcgcgatttggcgaacgtatgggggaggccagtcgtagtcactatatggcgaggatgcaaaccctgcgcctcgacggttttctgctgcgtccgctgctgagtctgtttagtagcctcattctttgtggcttgttgatgctgtttggcttctccgccagcggcaccattgaagtgggcgtgctgtatgcgtttatcagctatcttgggcgacttaacgaaccattaatcgaactgaccacgcaacaggcgatgctgcaacaggctgttgttgctggtgagcgcgtgtttgaactgatggacggaccgcgccagcaatatggcaatgatgatcgcccgttacagagtggcaccatcgaagtcgataacgtgagttttgcttatcgcgatgacaatctggtgctaaagaacattaatctctctgtgcctagccgcaattttgtggcgctggtcgggcataccggcagtggcaaaagcaccctcgccagtttattgatgggctattacccgctaacggaaggtgagattcgccttgatggtcgtccattaagtagcctaagtcacagcgcgctgcgccagggcgtggcaatggtgcagcaagatccggtggtgctggcggataccttcctcgccaacgtgacgctggggcgggatatctccgaagaacgcgtctggcaggcgctggaaaccgtgcaactggcggagctggcgcgtagcatgagcgacggtatttacacgccgctgggcgagcaggggaataatctcagtgttgggcaaaagcaactgctggcactggcgcgcgtgctggtcgagacgccgcaaatcctgatccttgatgaggcaaccgccagcattgactccggtactgaacaggcgattcaacatgctctggcggcggtgcgtgaacataccacgctggtagtgattgctcaccgcttaagcaccattgttgatgccgacaccattctggtgcttcatcgtgggcaagccgtggagcagggcactcaccagcaactgctggcggcccagggacgctactggcagatgtatcaactgcaacttgcgggcgaagagctggcagccagcgtgcgtgaagaggaaagtttgagcgcctgaatagcgcaatatttcatcgttggtgcaaaaatgtaacgcactgtgcactgtcatagtgcgttttcattttcaaacttcttaacttcctgctctctttctcgtttttcatttctggcacaccgcttgcaataccttcttcgtgtagcagaaccattaccgaattctgaccggaggggatctatgaagctggtgaccgtgataatcaaaccattcaagctggaagacgttcgtgaagcgttatcttccattggtattcagggcctgaccgtcaccgaagtgaaaggtttcgggcgtcagaaagggcatgccgagctgtaccggggggcggaatacagcgtcaatttcctgccaaaagtaaaaattgatgtggcgattgctgatgaccaactcgatgaagtgatcgatatcgtcagtaaggcggcttacaccggaaaaattggcgacggcaaaatcttcgtcgctgaattgcaacgcgtcattcgtattcgtaccggcgaagccgacgaagcggcgctgtaatctctggcacacagcaacaggaacgaaaaatgaagatagcgacgataaaaactgggcttgctagtctggcgatgcttccgggactggtaatggctgcacctgcggtggccgataaagccgacaatgcgtttatgatgatttgtactgcgctggtgctgtttatgactattccggggattgccctgttttacggtgggttgattcgcggcaaaaacgtgctgagcatgctgacgcaggtgacggtgacatttgcactggtctgtattctctgggtggtttacggttacagcctggcgtttggtgagggcaacaacttcttcggcaacattaactggttgatgctgaaaaacatcgaactgacggcggtgatgggcagcatttatcagtatatccacgtggcgtttcagggaagctttgcctgcattaccgtcggcttgatagttggggcgctggcggaacgaatccgcttcagtgctgtgttgattttcgtggtggtatggctgacgctctcttacattccgattgcgcatatggtgtggggcggtggtttgctggcttctcacggtgcgctggatttcgcgggtggcaccgtggtgcacattaacgccgcaatcgccggtctggtgggcgcgtatctgataggaaaacgcgtgggcttcggtaaagaggcgtttaaaccgcacaacctgccgatggtcttcaccgggactgccattctctatatcggttggtttggctttaacgccgggagtgcgggcacggcgaatgaaatcgcggcactggcatttgtgaatactgtggtcgcaacggcggcggcaattcttggctggatcttcggtgaatgggcgctgcgtggtaagcctagtctgctgggggcgtgttctggcgcgattgccggtctggtcggcgtgacgccagcctgcggctacattggggttggcggcgcgttgattatcggcgtggtagctggtctggcgggcttgtggggcgttaccatgctcaaacgcttgctgcgggtggatgatccctgcgatgtcttcggtgtgcacggcgtttgtggcattgtcggctgtatcatgaccgggatttttgccgccagcagcctgggcggcgtgggcttcgctgaaggtgtgacgatgggccatcagttgctggtacagctggaaagcatcgccattacgatcgtctggtccggtgttgtggcatttatcggctacaaattggcggatctgacggttggtctgcgtgtaccggaagagcaggagcgagaagggctggatgtcaacagccacggcgagaatgcctataacgcgtaacaagcactgcaaaaaacagccggacggttttcacctccggctatttttttaattgtgattacgcatcaccccttcctgaacggtgctggcaaccagtacgccgtcttgggtataaaactcaccgcgcacaaagccacgtgcgctggacgcgctggtgctctccacgctatacagcagccattcattcaaattaaacgggcgatggaaccacatggaatggtcaatggtggcaatctgaatccccggttcgagaaaaccgatgccgtgcggctgtagagctaccggcaggaagttaagatcagaagcgtaaccgagcagatactgatgaacgcgcaggtcatccggcacgctaccatttgcgcggatccacacctgacgatgtggttctgcgacgtgacctttcagtgggttatgaaactccaccggacggacttccagcggacgatcgcagatgaatttatctttcagcactggcggcagcaggtgcgccaggctttgggcgatttgcgtttcgctagggaggccatcaggcgctggcgcggacggcattgttttttgatgttcgaaacccgcttctggtgcctggaaagaggcagtcatataaaaaatcggtttgccgttttgaatagcagcaacccggcgggcgctgaagctgttaccgtcacgcagcgtttcgacatcataaataatcggcttcttactatcgccagggcgaagaaagtagctgtgaaagctatgtaccagccgctcttcagggacggtctcttttgcagcatacaaggcctgacccacgacctggccgccaaacacctggcgtaaacctaaatcttcactctggccgcgaaagagtccttcctcaattttttccagatttaacaatgtcagtaaattttttagcgcctgactcatataactctccagtaacaaagctgccgcagcaagccaaagtgagttgagtataacgcaaatttgctactggtccgatgggtgcaatggtctgaattacgggctaattacaggcagaaatgcgtgatgtgtgccacacttgttgacgttactattttgttaaccactcttccggcgaggaaagttagcccgctggtgcattgataataaggagaaatgaatgaaactcgtgcacatggccagtggtttagcggttgcgattgcgttggcggcttgcgcagataaaagcgcggatattcagacgccagcaccggctgcaaatacgtctattagtgcaacacaacaaccagctatccagcaaccgaatgtctccggtaccgtctggatccgtcagaaagtcgcactgccgcctgatgctgtgctgaccgtgacactttctgacgcgagcttagccgatgcaccgagtaaagtgctggcgcagaaagcggtgcgtactgaaggtaaacagagtccattcagctttgttctgagttttaacccggcagatgttcagccgaacgcgcgtattctgttgagtgcggcgattaccgtgaatgacaaactggtatttatcaccgataccgttcagccggtgatcaaccagggcggaactaaagccgacctgacattggtgccggtacagcaaaccgccgtgccggttcaggccagcggtggcgcaacgactaccgtacctagcactagtccaactcaggtgaatccgtctagcgcagttccagctcctacgcaatattaagcgacgttaaccctctccgcccggagagggttagtagttccagcgataacgctgcaagtcgatttgcccgcttccgcttaccatcacaccttctgccagtaatgcctgtcgctgacgctgtaaatccggtccggttaggctaattgtgccgtggcgattaaccacccggtgccagggtaaggtgctgccttcagggagacgctttaacacaccgcccacctggcgcgcggcgcgggggcttcccgccagtttcgccacatcaccgtaagtggtgacatagccttcgggaatagcggcgacgatttgccagacgcgttggggaaaactatcttctttttccatcttttcttcctgaggtaatttttcagcataatctggaaaaacgccgctgtgaagtcgcattgcgcaagaaaccagcatctggcacgcgatgggttgcaattagccggggcagcagtgataatgcgcctgcgcgttggttctcaacgctctcaatgggggctctgttggttctcccgcaacgctactctgtttaccaggtcaggtccggaaggaagcagccaaggcagatgacgcgtgtgccgggatgtagctggcagggcccccacccatttctgcctcccaccgtttcgtcaaaaaatcccaacatggctaaactttaaccacaactgacgtcgcaagaattgtctggctgcgcagtacgcttcggaggtatgtctgatgaagtatgttgatggttttgtggttgccgttcctgccgataaaaaggatgcctatcgggaaatggccgctaaggctgcgccattgtttaaagagtttggcgcgcttcgtattgtcgaatgctgggccagcgatgtaccggatggcaaagtgaccgattttcgtatggcggtgaaagcggaagagaatgaagaggttgtctttagctggattgaataccctagtaaagaggtccgcgacgctgctaatcaaaagatgatgagcgacccacggatgaaagagttcggcgagtccatgccgtttgacggcaagcgaatgatctatggcggattcgagagtatcatcgacgaataagtagcgtgacgggctgtgcggcgtgccgtcagcccaaaaattcacaaatgttgctcggcccagcgtaagaaatcttctttcggtaatgccttgctgtagagccagccctgaccgtagtgcacgccatgctggcgtaaccactcttcttgtttactggtttcgattccctccgctaccattttcagtttcagtgtttttgccatttcgatgatatgcggcgtgacatttttatattccagcgcatcaacgaaagatttatcgatcttcagaatgtcgacatccagatcctgtaaataacttaaactactataccccgtaccaaaatcatcaagataaatttcatggcccgcctcccggtagcgagaaattatcggggcgctggttttcggatcggcaaactcgcgttcagtgagttcaagcgcgatctgtctgggattaacctgatagtgattgatcatgtcacgcagcaattgcgggattttttcgctggtgagcacgggggattcaagattgatgctaatatgctgctgtggatgctgacgcagccagtcgcccatatcttcaaagacgcttcttataatcagtagcgtcaatggctcagaaaggcccgtttgctgtgccagcggaataaaactatctggactcaaccaactaccgtctgtctgcggccagcgcgccagtgcctcagcaccgacaattttgccattggctaaggagacaatcggctgatagtgcacgcaaatatcacgattttcgatagcatcctgcagccgatgatgcggactctgaatacggcgcaaaatacgcagcacaaacatcgctgccagcaggccaatcaccaacccgagcggtaaccaaataaagacttgccgatgccagcctttctgcaacattttcgtactagcccatgtgatgatgctaatattcatctccggtaagggcaggatatcgtaaatgattccattattttcgatatgctcaccgggtgttttttgtagcctggtaataattccctgagcaatttcatcgctgctggttatgacaacgttatgggcattgccaataatggcggcatcaatttgccaactgctatagggaatgacatcaataaaggaagcggggtcgatcatgacgacataatgtgccgttcccatggcgaccatgtaacggataatgcctaaatcgttatggcttgttaaccagacacgataaccatctttgctaattttacctggctcggggaaggtatcgggcggactttcatgctccagagagctacactggggaacgttgttatcgatataagccacttcctgaatatagcgataactgtaagatacccgacgcatttccatgagatgggcttcgctacaggcagcgccttgccatctttccagctcctgcagcgcatctttcccttgtgtcgccaccttattggctcgaatagcgacgcgggaggaataggtatccagctcttcaataaagcttgtttctacctgctgatgggccagccagatgcttaagccgacaggcagcaatacactaagaatcagtactccgctaataaggccgaccagatgtcgtgttctcaccagcatatccttattaacacagtgtagggaaagtatatctgattgtggaaaaaggctggctggagataaggaggtagagctggtatttcatgaagtgatgggtggaaacgatcattgtcatttgaccaggcgcagagctttacgcctggtatgtaaccctaacttaagatgtactttcggcgcgagcgagggtaaaaatatcgtaaaaagacagttcacctttacggacgatcattttttgcagttgttccttatgaacatccgcgacacgcggagagttcaagatggcttcaaccagcgcggcaggtacaaagcgcgtgttgtaccattcgccgttatagcaaacgcggaaatccagcacgtcgatatcttcatagcggtagcgtgggtagacatcgaaaaagaagaaaccattaagcaggataaataatacaaccagtagccagacagagccactcagcgtttcggactgcaacatcaccgccagggtggcaaaaaaagcaacgtacataccgataaacagccccggatgtttacggataaaactgatactaaagcggggtttgttgtcgcgtttttcgcgggtattcagagactcaatcgtttcggtcagcaggcgttgtatttcggtcatcgtttgccttcgtggtatctgcaactttccagggaacaccctattttaacgtgggaatagtagaggggaagtaacagatctaccacaattttgcataacagttgcgaaaaaccgattacaattttttaattattctggctggattaccgcccacgacaacgttgtccgggacatcttttgtgacaactgcaccactggctaccacgacgttatcaccaatggtcacaccagggttaatgaccgcgcgtccgccaatccagacgttattaccgatggtgacgggtttccccagttcagcaccgctattacgtgctacagggtcgatgggatgtgttgccgtgtagatatgaacgcctggtgccaacatacagttatcaccgatgcgaatagggcagacatcaagcatcacgcaatcgaagttggcgaaaaaattattaccgagaaaaatgttatagccatagtcacagcgaaacgttggctcaatataagcctctgtcacctgaccgaatagatcagcgagaatttgctggcgtaatgtgtgctcttccgccagggaatgattgtatcggtgaataagctgacgagcgcgcaggcgatcgcgagataacgtctcatctgcgctgcgatacaactcaccagcaatcatcttttctttttctgtgctcattactgacctccggttgctgaaaatgcggcaacacagtaagacgaaaagtcagtgaagagaacgttcccattacatctgtgtgataaagatcacatagggtatgtcttcatggcgaaaaagtataaaattcttaataaacagccggttatagctccgaaagcgaattatttattagcgaataaatttccatacactggaagggatcttgtcgtacagtttattcatggtcaattcggcgaggcggtgatctgcggcactgtaaaataccgccagttcattatcacttaattcgtatttatttttctcgataacacgctccagcgtgtcaattgtctggcaacgacgtaaacgcattaaataatcggttttcgttaaaggtttttcggacatacttctacctatggttgtaataattttaacaagataaactcgcaggattctctttcgtcgcattgacaaaacaacggaatagtcgattaccactcttccgccatttctgaagatcctgcatattaataccataactactgaacaacataaaggtgtcatccagatattcgtcgatctgctcaatgagcttattgtcttcattatacttaattttgtaattaagtgcgaaggtcgcaatatgctcaatcagttcattcaactggaggttgatcgcgctggttgggtcgtttacccagccatgattgctttcttcaaggtttgcaaggcagtcatgatacagggtttcacagagaaacttaagctgtgcgatatcatgtcttttgggactgtattcatccataacgcgtccccttcttagcggttgaactaacggacacctttcgggatggaaaaaacttactgacctggacttgccctctcgtttgttagcttaactataagccactctttgcaggttttcatcgcattattacgaaaaattacaattaggaaggaagcgggacaggactcactttttcatactagcactaacccgcagcaggtaaaagcagtttgctcgaactattcataacatttcaggattatcgccagatgaaattggtgacactaataccaggattgctctgaatatgacgtaataaccgaggaatgaataaagaattaccgcaaataattaagaatagcctctaaatgattatggattattaaatctattagcgctacttaatataaattaactaacaatcagtattttttatgaattttatccgtggttaatactggttttcgtatgagatcctgagttggtggttcaattactccttaatgttcgtaggttatgcataaaaaaggccgcttacgcggccttagtgattacacgttgtatcaatgatgatcgacagtatggctgtgctcgatatcttcattcttgcggctaaagcggcggcgaaccaccacaaagaataccggaacgaagaagattgccagtaccgttgcggtcaccatcccgcccattacaccggtacctactgcgttctgcgcgccggaaccagcaccagtactgataaccagcggcataacgccgaggataaacgccaggctggtcatcaggatcggacgtaaacgcatccgcaccgcatcaagcgtcgcttcaatcagacctttaccttctttatccatcaagtctttggcgaattcgacgataaggatcgcgttcttcgcgctcaacccaatggttgtgagcaggcctacctggaagtaaacgtcattggtcaggccacggaaggtggcagccagcaacgcaccgataacccccagcggaacgaccagcataacggagaacggaatgctccagctctcgtacagcgccgccagacacaggaacacgacaatcaagctaatcgcgtacagactaggtgcctggttgccggagagacgttcctgataggacatccccgtccagtcatagccaacaccggtaggcagtttgctcgccagttgttccatcagctccattgcttcaccggtacttttacccggtgccgcctggcctaagatttccatggatggcaggccgttgtaacgttccagacgcgggctaccgtactcccaacgagaagaggagaacgcgctgaatggcaccatctgaccatcagcagcacgaacataccagtcgccgatatcatccggcagcatacggtatttcgcttcactcatgacataaactttcttcacacgaccgcggtcgataaagtcgttcacatagctgccgccccatgcagcgcccagagtggtgttaatgtcgttgatagaaacacccagcgcctgcgctttttcctggtcgatatcaatcttaaactgcggggtatcttccagaccgtttggacgtacgctggtcaacatatcagggtgcttcgctgcttctgcaagcaactggttacgcgcctgagtcagtttttcgtgaccaaggccagcctggtcaatcagctcaaagtcaaagccggttgcagtacccagttccacgattgcgggcaggttaaaggcgaaaaccatcgcatctttgatttggctgaaagcgcgtgttgcacgcatggtaatcgcttcaactttgttttcttcgcccggacgatcggcccagtccttcaaggaaacgaacgcaataccggtattctgaccacgtcccgcaaagccgaagccgttaacggcgaacacgctctcaacgttgttcttttctttggtcagatagtaatgcgttacctcattgagcactttctgtgtacgttcctgcgttgcacctgctggcagctgaaccatggtcataaacacgccctggtcctcatctggcaagaaggagcttggcagacgcacgaacagataggccatgccgaccacgatgatcagatacagcaccaggtaacgccccgtactgcgcagaataccgcctacgctgtcggtgtagtggtgcgtgctcttctcgaacatgcggttaaaccagccgaagaagccttttttaccttccccgtgatcgcctttggcaatcggtttcagcatggtggcacaaagagctggagtcaggatcaacgccaccagtacgctcagcgccattgcactaacaatggtaatagagaactgacgatagatagcaccagtagaaccgccaaagaaggccatcggtacgaataccgcgctcagtaccatcgcgataccgaccagagcgccctgaatctgccccatgctcttacgggtagcttcttttggcggcaaaccttcttccgccataacacgctcaacgttttctaccacaacgatggcgtcatccaccaacaggccgatggcgagcaccatcccgaacattgttagcgtgtttatgctgaagccaaaggcggcaaggacggcaaaggtcccgagcaataccaccggtacggcaatggtcggaatcaacgtcgcgcggaagttctgcaggaacagatacataaccaggaacacgaggatgatcgcttcgaccagcgttttaaccacttcgtgaatagagattttcacgaacggcgtggtgtcgtatgggtaaacaattttcagaccgctcgggaagaacggttccatcttcgccagttcagcacggattgccgcagcggtatccagcgcgtttgcaccggtcgccagcttgatccccagaccggaagccggttggccgttaaactctgcgatgatgtcgtagttctcaccacccagctcaatcttcgcgacgtcacgcagcagcacgcgggaaccatcctgattcactttcagcaggattttgccgaactcttcagtagaggtcagacgcgtctgagcaataatagaggcgttaagctgttggcctttcaccggcggcgtaccaccgagctgacccgccgcaacctgggcgttctgcgctttgatggcggtaatgacatcaaccggcgttagctggaatttgttcagctcattcgggttcatccagatacgcatcgcgtactgactaccgaacaactgaacatcacccacgccgctcgtacggctgatggcatctttcatattcgccgccacgtagtcggagatatcctcctgcgtcatggtgccatcggtgttgataacgccgacaaccatcaggaagctgctggaacttttctcaacgctcaccccttgctgctgaacttcttgcggcagcaacggcatcgccagctgcagtttgttctgcacctgaacctgcgcgatatccgcatcagtaccagactcaaaggtcagggtgatctgcacggtacccgtggagtcactgttagaggacatgtacatcaggttatcgataccgttcatattctgttcgataacctgtgtcaccgtgtcctgcactgttttcgcatcagcgccggggtaggaggcggagatcgttactgccggcggtgcaatcgtaggatgttgcgccaccggcagtttgaggatcgccagcccccctgccaacatgatgataatggcgatcacccacgcaaaaatcgggcgatcgataaagaaattaggcatgtcttaacggctcctgtttaagttaagacttggactgttcaggctgagcaccgcttgcggcttgctggttattatcagcggtaacttcttgtgcttttacctggacaccaggacgcactttctgcagcccacttattactacgcgatcgcctgctttcagaccttctgtcaccagccacttatcgccaatagcctggcttgcaacgatcggacgggtttccactttgtcatccgcgccaactaccagtacggtggcatcgccacgcggcgtacgggttacgccctgttgcgggactaaaatagcgtttggattaagcccttcttccagacgtgcgcgcacgaacatacccggcagcagagtgtgatccgggttcgggaagatagcgcgtagggtgatagacccagtggtctgatcaacggtaacgtcagagaattccagcgtaccgtcctgcgggaacttaatgccgtcactggtgatcagactcactttggctttgccgttctcttgtttcagcgtgccattcgccagttcctgtttcaggcgcaggaagtcgttgctggactgggtcacatcaacgtagatcggatcaagttgctgcacggttgccagcgcagtcgcctgaccgttctgtaccaatgcgccttccgtcacgttgctcttaccaatgcgaccgctaatcggagaggtgactttggtgtaagccagattgatccgcgcagtttcaacggcagctttcgccgcagttaccgcagcattcgcctgttgcgcatcagccagagcctgatcgtactcttgcttactgatgtactgagtaccgagcagtttctgataacgattcaccgtcaattgcgcgatattggctgcagcctgggctttcgccagatcacctttcgcactgtcgtatgtcgcctgataggtcgcaggatcaatctgatagagagagacacctgcttcgatgtcgctaccttctttgaaattacgcttcaggataatcccgctaacttgaggacgaacttctgcgatccggtaggcactggtgcgacccggaagctcggttgtgatctgcagaggttcagttttgactgttactacgccaacggcgggcatctgctggccaccttgttgggcctgtttgtcgtcacatcctgttagggctaagctgccactgagcatcagaacgaccgccagaggcgtaaaccctctgtttttgttcatatgtaaacctcgagtgtccgatttcaaattggtcaatggtcaaaagttaataaacccattgctgcgtttatattatcgtcgtgctatggtacatacattcacaaatgtatgtaaatctaacgcctgtaaattcacgaacatatggcacgaaaaaccaaacaagaagcgcaagaaacgcgccaacacatcctcgatgtggctctacgtcttttcagtcagcagggggtaagttccaccagcctgggcgagattgcaaaagcagctggcgttacgcgcggtgcaatctactggcattttaaagacaagagcgatttgttcagtgagatctgggaactgagtgaatccaatattggtgaactagagcttgagtatcaggcaaaattccctggcgatccactcagtgtattaagagagatattaattcatgttcttgaatccacggtgacagaagaacggcgtcgattattgatggagattatattccacaaatgcgaatttgtcggagaaatggctgttgtgcaacaggcacaacgtaatctctgtctggaaagttatgaccgtatagaacaaacgttaaaacattgtattgaagcgaaaatgttgcctgcggatttaatgacgcgtcgcgcagcaattattatgcgcggctatatttccggcctgatggaaaactggctctttgccccgcaatcttttgatcttaaaaaagaagcccgcgattacgttgccatcttactggagatgtatctcctgtgccccacgcttcgtaatcctgccactaacgaataaccctgaatctgactccaggatttttcctggacattttcgtcgttgctattctggttcactgcgtcgtgatattcttgcggtttgactttttcaggtcgttcttcaggttcagaaaccttcattcatcatgactatgttccagtattacaaacgaagtcggcattttgtttttagtgcatttattgcttttgtttttgtcttgttatgccagaacacggcgtttgcgcgggcgagtagcaatggtgatctgccgacaaaagcggacctgcaggcgcaacttgacagtctaaataaacaaaaagatctttctgctcaggacaaactggtgcagcaggatctgacagatacattagccaccctcgataaaatcgatcgcataaaagaagagacagttcagctacggcaaaaagtcgctgaagcgccggaaaaaatgcgccaggcgaccgcggcgttaacagcacttagcgatgtcgataacgacgaagaaacgcgcaaaattctgagcacgctgagcttgcgccagctggaaactcgcgttgcccaggcgctggacgatttgcaaaacgcacaaaacgatctggcgtcttataacagccagctggttagcttacagacgcagcccgaacgcgtgcaaaatgcgatgtataacgctagccagcagctgcaacaaattcgcagtcgtctggatgggactgatgtcggcgagacagccttacgtcccagccagaaagtgttaatgcaggcccagcaggcgttgctgaatgcggagattgaccagcagcgtaaaagcctggaagggaacaccgtcttgcaggataccttgcaaaagcaacgtgattacgtgacggcgaacagcgctcgtctggagcaccagttacaactgttgcaagaagcggtaaacagcaagcgcctgactttaaccgaaaaaacggcgcaggaagccgtctccccggatgaagccgcgcgtattcaggctaatccgctggtgaagcaggaactggaaattaaccagcagttaagtcagcgtctgattaccgcgactgaaaacggtaatcagttgatgcagcaaaacattaaagtcaaaaactggctggagcgggcgctgcaaagcgaacgcaatattaaagagcagattgccgtcctgaagggcagcctgctgttgtctcgtatcctttaccagcaacaacaaacgctgcccagcgcggatgaactggaaaacatgaccaaccgcatcgcggatttgcgtctcgaacagtttgaagttaaccagcagcgtgatgcactcttccagagcgatgcgttcgtcaacaaactggaagaaggtcacaccaacgaagtcaacagcgaagttcacgatgcgttattgcaagtggttgatatgcgtcgcgaattgctggatcaactcaacaaacagttgggtaaccagctgatgatggccattaacctgcaaatcaaccagcagcagttaatgagtgtgagcaaaaacctgaaatccatcctgactcagcaaatcttttgggtgaacagtaaccgtccaatggactgggactggatcaaagcgttcccgcaaagcctgaaagatgaatttaagagcatgaaaatcacggtgaactggcaaaaagcctggcccgccgtttttatcgctttcctcgctggtttgccgctgctgttgattgccgggctgatccactggcgtctgggctggctgaaagcgtatcaacaaaaactggcttccgctgtgggttccctgcgtaacgacagccagctcaacacaccaaaagcgatccttatcgacctgatccgtgcgctgccggtgtgcctgattattctcgcggttggcctgattctgttgaccatgcagctcaacatcagcgaactgctatggagcttcagcaaaaaactggcgatattctggctggtgtttggcctgtgctggaaggtactggagaaaaacggcgttgccgtacgtcacttcggcatgccggaacagcagaccagccactggcgtcggcaaattgtccgcatcagtctcgcattgctgcctatccatttctggtctgtggtggcagaactttccccgctgcatctgatggatgatgtgctggggcaagcgatgattttcttcaacctgctgctgattgccttcctggtatggccgatgtgccgcgaaagctggcgtgataaagagagccacaccatgcgactggtcaccattaccgtgctgagcataatcccgattgcgctgatggtgctgactgctacaggctacttctacactacgctgcgtctggcaggacgctggattgaaaccgtttatctggtgatcatctggaacctgctgtaccagacggtactgcgtggcttaagcgtagcggcgcggcgtatcgcctggcgtcgtgcgctggcgcgtcggcagaatctggtgaaagagggcgcagaaggtgctgaaccgccggaagaacccaccattgcactggagcaagttaaccagcagacgctgcgtattaccatgttgctgatgtttgcgctgttcggtgtcatgttctgggcaatttggtccgatttgatcaccgtgttcagctatctcgacagcatcacgctctggcattacaacggcactgaagctggcgctgcggtggtgaaaaacgtcaccatgggcagtctgttgtttgcgattatcgccagtatggtggcctgggcgttgattcgcaacctgcctggtttactggaagtgctggtgctcagccgactgaatatgcgccagggcgcgagctatgccattactaccatccttaactacatcattattgctgttggtgcgatgacggtgttcggaagcctgggcgtctcttgggataaactccagtggctggccgcagcattatccgtaggtcttggttttggtttacaagaaattttcggtaacttcgtctccggtttgatcattctattcgaacgtccggtgcgtattggcgatacggtaaccattggtagcttcagcgggacggtaagtaagatccgtattcgtgcgacaacgattaccgatttcgatcgcaaagaagtgatcatcccgaacaaagcgtttgttaccgagcgtctgatcaactggagcttgactgacactactacgcgtctggtgatccgtctcggcgtggcctatggctccgatctggaaaaagtgcgtaaagtgttactgaaggcggcgactgagcacccaagggtgatgcacgaaccaatgccggaagtcttctttacggcatttggtgccagcacgttggatcatgagctgcgtctgtatgtgcgtgaactgcgtgaccgtagtcgtactgtcgatgagctgaaccgtactatcgatcagctgtgccgtgaaaacgacatcaacattgcctttaaccagcttgaagtgcatctgcacaacgagaagggcgatgaggtgacggaagtaaaacgcgactacaaaggcgatgacccgacgccagcggtagggtaaaaacgaaagggggcaacatttagttgccccgagattgctaacaaagtgcgcgttgttcatgccggatgcggcgtgaccgccttatccggcctacgaaaccgcaagaattcaatatattgcaggagcggtgtaggcctgataagcgtagcgcatcaggcagttttgcgtttgcccgcaaccttaggggacatttagcgaccccatttatttctcacttttccgcctcatcatcgcgcgttaatttcttttcataatcacgctttacaatatccagcgcgcgcagcacggtactggcagggatctgattttcctccagcagcacaatcaaatcgacagccagtttgacatcgtcaggggcattttccagactcatattctctccattgttagcgggttaaacgcgctaacctgttttcgattttttccagcgcatggcggcagcgtgccaggcgcgcttcataggcttccacttcacgatgcagcgtttgctgttccacgagatcggtcacccgcgccagacgggctctgcgttcggcaaccatctcacgtagccgccgctcaaaatcctgatgctgaatacgtttacgctgccagcgggcaattttcggtggtgcactgtcccactcgcgcaaactccaggcggaggcttcacgcgcgatggcttccagttgtgccgccagatgttccgccagccaggccacttgcggcagctgttgctgctcaactgcatgacgaagcgcagccagattatcgcccgcctcgtcgagacaagcctgtagtgttgtcgcacgagtctgaaaaagatgcctgtcgaaacgagcacttagcgtggcgaactgactcaccggggcacaacgctgacgcagcgtagcgagctgtccttccagtttttccagcagcagggcggttttcacgataagacctcaatgaaaatgataattgttatgctaaagtagccactctgtaagctgacaacactcaatatgcaacgaatcattttaatcatcattggctggctggcggtagtgctgggtacgctgggcgtggtattaccggtattaccgacgacgccgtttatcctgctggcggcctggtgctttgcccgttcttccccgcgctttcacgcctggttgctgtaccgcagttggtttggcagctatctacgtttctggcagaaacatcatgcgatgccgcgcggcgtcaaaccgcgggcgattttgcttattttgctcacgtttgccatttctctgtggttcgtccagatgccatgggtgcgcatcatgttgctggtaattctcgcctgtttgcttttctatatgtggcgaattccggtgattgatgaaaagcaagaaaagcactgaagcacaacaatcgcagttgcaattattgcgtacagccagtacattctggcgttttcgagcacaggcgcaggcggtcaaaggttaaacaactgttacttttgatacgtttaaaacgcgccgtgagtaccaccgtaacaagcaggcatacacttatgaccgcgactgcacagcagcttgagtatctcaaaaatagcatcaaaagcattcaggactacccaaaacccggcattcttttccgcgatgtcaccagcttactggaagacccgaaagcttacgctctcagcatcgacttgctggttgagcgttacaaaaatgcgggcattaccaaagttgtcggcaccgaagcgcgtggcttcttgtttggcgctccggtagctctgggtctgggcgttggctttgtaccggtccgtaaaccgggcaaactgccgcgtgaaaccatcagtgaaacttacgacctggaatacggcaccgatcagctggagatccacgttgatgccatcaaaccgggcgacaaagttctggtggtggacgacctgctggcaaccggcggcactatcgaagcgaccgttaaactgatccgtcgtctgggtggtgaagtggctgacgctgcgttcattatcaacctgttcgatctcggcggcgaacagcgtctcgaaaaacagggcattaccagctacagccttgtcccgttcccgggccattaattatcgccagtcttgtgctgcccacgctacggacagcacaagatgtgcattcagcctcgccgttctgacggggctgtgttagcattaccccttcgtgaatccaccttccagcgtttcagagcctgccaatgagttatcaggtcttagcccgaaaatggcgcccacaaacctttgctgacgtcgtcggccaggaacatgtgctgaccgcactggcgaacggcttgagcttagggcgtattcatcatgcttatcttttttccggcacccgtggcgtcggaaaaacctctatcgcccgactgctggcgaaggggctaaactgcgaaaccggcattaccgcgacgccgtgcggcgtgtgcgataactgtcgtgaaatcgagcaggggcgctttgtcgatctgattgaaatcgacgccgccagccgcaccaaagttgaagatacccgcgacctgctggataacgtccagtacgctccggcgcgtggtcgtttcaaagtttatctgatcgacgaagtgcatatgctgagccgccacagctttaacgcactgttaaaaacccttgaagagccgccggagcacgttaagtttctgctggcgacgaccgatccacagaaattgccggtgacgattttgagtcgctgtctgcaatttcatctcaaggcgctggatgtcgagcaaattcgccatcagcttgagcacatcctcaacgaagaacatatcgctcacgagccgcgggcgctgcaattgctggcacgcgccgctgaaggcagcctgcgagatgccttaagtctgaccgaccaggcgattgccagcggtgacggccaggttagtacccaggcggtcagtgcgatgctgggtacgcttgacgacgatcaggcgctgagcctggttgaagcgatggtcgaggccaacggcgagcgcgtaatggcgctgattaatgaagccgctgcccgtggtatcgagtgggaagcgttgctggtggaaatgctcggcctgttgcatcgtattgcgatggtacaacttagccctgctgcacttggcaacgacatggccgccatcgagctgcggatgcgtgaactggcgcgcaccataccgccgacggatattcagctttactatcagacgctgttgattggtcgcaaagaattaccgtatgcgccggaccgtcgcatgggcgttgagatgacgctgctgcgcgcgctggcattccatccgcgtatgccgctgcctgagccagaagtgccacgacagtcctttgcacccgtcgcgccaacggcagtaatgacgccaacccaggtgccgccgcaaccgcaaagtgcgccgcagcaggcaccgactgtaccgctcccggaaaccaccagccaggtgctggcggcgcgccagcagttgcagcgcgtgcagggagcaaccaaagcaaaaaagagtgaaccggcagccgctacccgcgcgcggccggtgaataacgctgcgctggaaagactggctagcgtcaccgatcgcgttcaggcgcgtccggtgccaagcgcgctggaaaaagcgccagccaaaaaagaagcgtatcgctggaaggcgaccactccggtgatgcagcaaaaagaagtggtcgccacgccgaaggcgctgaaaaaagcgctggaacatgaaaaaacgccggaactggcggcgaagctagcggcagaagccattgagcgcgacccgtgggcggcacaggtgagccaacttagcctaccaaaactggtcgaacaggtggcgttaaatgcctggaaagaggagagcgacaacgcagtatgtctgcatttgcgctcctctcagcggcatttgaacaaccgcggtgcacagcaaaaactggctgaagcgttgagcatgttaaaaggtagtacggttgaactgactatcgttgaagatgataatcccgcggtgcgtacgccgctggagtggcgtcaggcgatatacgaagaaaaacttgcgcaggcgcgcgagtccattattgcggataataatattcagaccctgcgtcggttcttcgatgcggagctggatgaagaaagtatccgccccatttgatcgtaagcacagcttacgttcgtcatccttaacgtgattgagagagaaacctatgtttggtaaaggcggtctgggtaacctgatgaagcaagcccagcagatgcaagaaaaaatgcagaaaatgcaggaagagatcgcgcagctggaagtcaccggcgaatctggcgcaggtctggtaaaagtgaccatcaacggtgcacacaactgccgtcgcgtagagatcgacccgagcctgctggaagacgacaaagagatgctggaagacctggtggctgcagcattcaacgacgcagcacgtcgtattgaagaaacgcagaaagaaaaaatggcctctgtatcctccggaatgcagctgccgcctggctttaagatgccgttctgatgcaaaccagcccgctgttaacacagcttatggaagcactgcgctgtctgccgggcgttggcccgaagagcgcgcagcgtatggcgttcacgctgcttcagcgcgatcgtagcggcgggatgcgtctggcgcaggcgctcacccgggcgatgagcgaaatcggccactgcgccgattgccgcactttcaccgaacaggaagtctgtaacatctgtagcaatccgcgtcgtcaggaaaacggtcaaatctgcgtggtggagagtccggcggacatctacgccattgagcagacggggcagtttagtggtcgttattttgtgttgatggggcatctgagtccgctggacggcatcggtccggatgatatcgggcttgatcgtctggaacagcgtctggcagaggaaaaaatcactgaagtgatcctcgccaccaaccccacggttgaaggtgaagctaccgctaactacattgccgagctttgcgcgcaatatgacgtggaagccagccgaatcgctcatggcgttccggttggcggcgagctggaaatggtcgacggcaccacgttgagtcactcccttgccgggcgtcataagattcgtttttaagcaaacgagagcaggatcacctgctctcgcttgaaattattctcccttgtccccatctctcccacatcctgtttttaaccttaaaatggcattattgaggtagacctacatgaaaggacaagaaactcgtggttttcagagtgaagtgaaacagcttctgcacctgatgatccattctctctattccaataaagaaatcttcctgcgtgagcttatctctaacgcctccgatgcggcggacaagctgcgtttccgtgcgctctctaacccggacctgtacgaaggtgatggcgaactacgcgttcgtgtctctttcgataaagacaagcgtacgctgaccatctccgataacggcgtggggatgacccgcgacgaagtgattgaccatctggggactatcgctaaatccggtaccaaaagtttcctcgaatccctgggttctgaccaggcgaaagacagccagctgatcggtcagtttggtgttggtttctactctgcgtttatcgtggccgacaaagtgaccgtgcgtactcgcgcggcaggcgaaaaaccagaaaatggcgtcttctgggaaagcgctggcgaaggtgaatacaccgttgccgacatcaccaaagaagatcgtggtactgaaatcaccctgcatctgcgtgaaggcgaagacgagttcctcgatgactggcgcgtgcgttccatcatcagcaaatactccgaccatatcgcgctgccggtagagatcgaaaaacgcgaagagaaagacggcgaaaccgttatctcctgggagaaaatcaacaaagcgcaggcgctgtggactcgtaacaagagcgaaatcaccgatgaagagtacaaagagttctacaaacacatcgcccacgactttaatgatccgctgacctggagccacaaccgtgttgaaggtaagcaggagtacaccagcctgctgtacatcccgtcccaggctccgtgggatatgtggaaccgcgatcataaacacggcctgaaactgtatgttcagcgtgtgttcatcatggacgacgcagaacagttcatgccgaactatctgcgcttcgtgcgtggtctgattgactccagcgatctgccgctgaacgtttcccgtgaaatcctccaggacagcacggtaacgcgtaacctgcgcaatgcgctgaccaagcgtgtgctgcaaatgctggaaaaactggcgaaagacgacgcggaaaaataccagaccttctggcaacagtttggcctggtactgaaagaaggtccggcggaagatttcgctaaccaggaagcgatcgccaaactgctgcgttttgcttctacccataccgattcttctgcgcagaccgtatctctggaagactacgtttcccgcatgaaagaagggcaggagaaaatctactacatcaccgcagacagctatgcggcagcgaagagcagcccgcacctggaactgctgcgtaagaaaggcatcgaagttctgctgctttccgaccgcatcgatgagtggatgatgaactatctgactgagttcgacggtaaaccgttccagagcgtgtctaaagttgacgagagccttgaaaaactggctgacgaagttgatgagagcgcgaaagaagcggagaaagcactgactccgttcatcgaccgtgtgaaagccctgctcggcgagcgcgtgaaagatgtccgtctgactcaccgtctgaccgatacgccagcgatcgttagcaccgacgcggacgaaatgagcactcagatggcgaaactgttcgctgcggcgggccagaaagtgccagaagtgaaatacatcttcgaactgaacccggatcacgtactggtgaaacgtgcggcagatactgaagatgaagcgaagttcagcgagtgggtagaactgctgctggatcaggcgctgctggcagaacgcggcacgctggaagatccgaacctgtttattcgtcgtatgaaccagctgctggtttcctgatgtaatgccggatgaccttcgtgtcatccggcatttttcttttcatcatctgcactttccgcaaattatctcgccattaaccgtttcagccccaggtgcctttcttgaggcaatcgcctgttggtggtatcgtttatcgctttttcaaaaaattcgacacattttaaggggattttcgcaatgcgtatcattctgcttggcgctccgggcgcggggaaagggactcaggctcagttcatcatggagaaatatggtattccgcaaatctccactggcgatatgctgcgtgctgcggtcaaatctggctccgagctgggtaaacaagcaaaagacattatggatgctggcaaactggtcaccgacgaactggtgatcgcgctggttaaagagcgcattgctcaggaagactgccgtaatggtttcctgttggacggcttcccgcgtaccattccgcaggcagacgcgatgaaagaagcgggcatcaatgttgattacgttctggaattcgacgtaccggacgaactgatcgttgaccgtatcgtcggtcgccgcgttcatgcgccgtctggtcgtgtttatcacgttaaattcaatccgccgaaagtagaaggcaaagacgacgttaccggtgaagaactgactacccgtaaagatgatcaggaagagaccgtacgtaaacgtctggttgaataccatcagatgacagcaccgctgatcggctactactccaaagaagcagaagcgggtaataccaaatacgcgaaagttgacggcaccaagccggttgctgaagttcgcgctgatctggaaaaaatcctcggctaattcgaaagcgcgcacggacagtcccctcgccccctcggggagagggttagggtgaggggaacaggcccgcacaagcaaacttatcagcaatctcaggccggatattcattcggccttttacaaaaacctcaatctgcgctattcctttttctgatttgacctctcacagcaattagttcttcttcctcacttttccgctacaattatcaacaagttgaatcgataagaggcggtaatgcgtcagactaaaaccggtatcctgctggcaaacctgggtacgcccgatgcccccacacctgaagcggtaaaacgctatctgaaacaatttttaagcgacagacgcgtggttgataccagtcggttgttatggtggccattgctgcgcggcgtgattttgccgctgcgcagcccgcgtgtggcgaagctgtatgcctctgtctggatggaaggtggcagcccgctgatggtttacagccgccagcaacagcaggcgctggcacaacgtttaccggagatgcccgtagcgctgggaatgagctacggcagcccaagtctggaaagcgccgtagatgaactcctggcagagcatgtagatcatattgtggtgctgccgctttatccgcaattctcctgttctacggtcggtgcggtatgggatgaactggcacgcattctggcgcgcaaacgtagcattccggggataagctttatacgtgattacgccgataaccacgattacattaatgcactggcgaacagcgtacgcgcttcttttgccaaacatggcgaaccggatctgctactgctctcttatcatggcattccccagcgttatgcagatgaaggcgatgattacccgcaacgttgccgcacaacgactcgtgaactggcttccgcattggggatggcaccggaaaaagtgatgatgacctttcagagccgctttggtcgggaaccctggctgatgccttataccgacgaaacgctgaaaatgctcggagaaaaaggcgtaggtcatattcaggtgatgtgcccgggctttgctgcggattgtctggagacgctggaagagattgccgagcaaaaccgtgaggtcttcctcggtgccggcgggaaaaaatatgaatatattccggcgcttaatgccacgccggaacatatcgaaatgatggctaatcttgttgccgcgtatcgttaaagctgagcggtaaagaactgagcgccgtcgcgaagagcctcgtcggcggttttcatcatccgactataatgcaaaaaggcgtgcagcgtgcctgggtagagtttgaactcacagggctgctgatgcgccgctaacgtctggtaaagcagacggctgtcatccagcagcggatcgaactccgccccggcaataaaacagggcggaacttcgcgagtgagatcattattaaacagacagtaatacgggctctcgcggtccgcgtcgttgcttaaatatgcctcttcgtacatctgcaaatcctgttgcgttaagccatcccagacaccgcccaacagacgacgagtcacggaatcccgtaatccgtaaagcccataccacagcaaaacgcccgcaactttaccgcaatcgatctgtttatcacgcaaccacaacgcactggcgagcgccagcatggcacctgcggaatcaccggcaaagccaatgcgggacatattgatttgataatcctccgcctgctggtggaaataacaacaagcagccacaatttcctctatcgcttgcggaaaacgcgcttcaggactaagggtgtaatcaataccaatcaccgtacattggctgtagcttgccagcaggcgcatgatgcgatcgtgggtatcgagattgccgagaataaaaccgcctccatgcaaataaaatagcgtcgctgggctatctggctgcggacaaaagagacgtgtttccacctgcccatattttgttggaaccatgtaagctctggttgccatttctggagcgcccgcattccagaatcggcgctcaagcgtgtaatactgtcgttgctcagcaatcgttcccgttgcgggccagggcggtaaatccggctgaagagtattcacaacggtcttcatttcagcagaaataaggtccagaacaggtagtttgttttccggcttcatacaaaaactcctttcaaattacgtcattgtaaggaaccactgccatgaaaatgcgatcccgcctgctgatattgaaactggctgcgtctcgcgcgctcccgtcagattgtgttaacattcgccgctcagttaaccacccgtaaaaacaaccatgaaatttcccggtaaacgtaaatccaaacattacttccccgtaaacgcacgcgatccgctgcttcagcaattccagccagaaaacgaaaccagcgctgcctgggtagtgggtatcgatcaaacgctggtcgatattgaagcgaaagtggatgatgaatttattgagcgttatggattaagcgccgggcatagtctggtgattgaggatgatgtagccgaagcgctttatcaggaactaaaacagaaaaacctgattacccatcagtttgcgggtggcaccattggtaacaccatgcacaactacagcgtgctcgcggacgaccgtagcgtgctgctgggcgtcatgtgcagcaatattgaaattggcagttatgcctatcgttacctgtgtaacacttccagccgtaccgatcttaactatctacaaggcgtggatggcccgattggtcgttgctttacgctgattggcgagtccggggaacgtacctttgctatcagtccaggccacatgaaccagctgcgggctgaaagcattccggaagatgtgattgccggagccagcgcactggttctcaccagttatctggtgcgttgcaagccgggtgaacccatgccggaagcaaccatgaaagccattgagtacgcgaagaaatataacgtaccggtggtgctgacgctgggcaccaagtttgtcattgccgagaatccgcagtggtggcagcaattcctcaaagatcacgtctctatccttgcgatgaacgaagatgaagccgaagcgttgaccggagaaagcgatccgttgttggcatctgacaaggcgctggactgggtagatctggtgctgtgcaccgccgggccaatcggcttgtatatggcgggctttaccgaagacgaagcgaaacgtaaaacccagcatccgctgctgccgggcgctatagcggaattcaaccagtatgagtttagccgcgccatgcgccacaaggattgccagaatccgctgcgtgtatatagccacattgcgccgtacatgggcgggccggaaaaaatcatgaacactaatggagcgggggatggcgcattggcagcgttgctgcatgacattaccgccaacagctaccatcgtagcaacgtaccaaactccagcaaacataaattcacctggttaacttatagtagcttagcgcaggtgtgtaaatatgctaaccgtgtgagctatcaggtactgaaccagcatagtcctcgtttaacgcgcggcttgccggagcgtgaagacagcctggaagagtcttactgggatcgttaagttatcgtcggttcgtaggccagataaggcgttcacgccgcatctggcatttggctctcgatgcctgatgcgacgctggcgcgtcttatcatgcctacatatttttcatattttacatccggcaaccaccgtttaccccgtcaccacctcacccgccggtggcgtttccagcagttccagcatggtacgggcgatttcacgctcgcccatcactacctgattcgcaccacgttcggtgatatacgccacttcatcgtcataatgggcgcgggcaataatctcaatatccggatttttcgcgcgggcagatgccacaatctcacccgcttcataaccgttgggaatcgtcaggatcagccattttgcacattccagatgcgccagttgcataatttcttcgttcgccgcattgcccaatactgcgcggaccccgcgctctcgcagctcatcaacacgggttcgactcgtctcaatcaccaccagcggaatatcagaggcgagcaatttctcccccagcaggctgcctacacgaccgtaacccaccagtagcgcatggttgcaaatatccactgggatctgcttctcttcttcgattgcctcttccagcgtctgctcttccagcgtttcggtcttcgccagatatttctccagtagtgcgaacagtaccgggttgagcataatgctcaggatcgcccctgccagtaccaggttttgtccggcctgcggcagtaaattcaatgccattcccagtcccgccaggataaacgcgaactcaccaatctgcgccaggctggcggcgatggttaatgccgtacgttgggagtgaccaaacagtcgcaccaggaaaaatgcggctaagctcttaccaaacagaataatcgccagcgtcgccagcactgccagcggttgctgaatcagaattaacggatcaaacaacatcccgacggagacaaaaaacagcaccgcaaacgcgtcgcgcaatggcagcgtatcgtgggcggcacggtgactcagttcagactcgttcagtaccatcccggcaaagaacgcaccgagtgcaaaggagacatcaaacagctctaccgcaccaaaggcaacccctaacgccagcgccagcacgctcagggtaaacagctcgcgagaaccggttgccgcgctgcgtgccataatccacggcaccagacggcgacctaccagcatcataatggcgataaatgcgatcactttgccgatggtgatccccatatcgactgcaagagtggcaaagcccacatcgccctgttccatcattcctgccactgcgggcagcaacaccagcgtcagaaccattaccaggtcttccacaatcaaccaaccgatggcgatttgcccacgctgactgtcaattaattgccgttcttcaagtgcgcgcagtaacaccacggtactggcggtggaaagacataaaccgaacacgataccggtcattaagctccagcccagcacggcagagagcgccatacccagcagcgtcgccacggctatctgggcgatcgcaccgggaatggcgatggcctttaccgccatcaaatccttcaggctaaagtgcaaaccgacgccaaacatcaacagaatgacgcccagttcagccagttccggggcaagcttggtatcggcaacaaagcccggagtgaatggtcctgccagcacacccgctaacagatatcccaccagaggagaaatacgtagtttattggccagcatgccgaggataaaggcgagcacaaggccgccaacaatggtggtgataagcggggtggcgtgatgcattccgtctccttttcctggtggttattgtccatttttggccgggaaaaccaaaattacaggtaatagtttatgacaatttcattgatgatgttcatgaataattattgaattttgcagaaaaatggaattagctgcaaaaaaagcacggatcggaaaacagaaggcggtttaacagaggaaaggcttatggcgactgtaaaacgatgcagccaaagtttgcctttggctgcaatgaaatcagtctttatgccggttatcaggcaggaatatggtcaacatccccaatagtggcaggaaagcacagattttatagactaactcgatgctggtgtgatcggcgataagccccagaactgccgctcccagacctcccatgccaaaagcaaaaccgaaaaagagtccagaaaccataccgatacgtcctggaagcagctcctgagcgtagaccagaatggcagagaatgcgctagcgaggataaatccaataatcaccgttaaaacccccgtccagtgcaggctggcgtagggtaaaatcagcgtaaacggcgcaacgccgaggatagagccccaaatcacatatttccgcccaattttatcccctacaggcccgccgatcaccgtacctgccgcaacggcaaacaggaaggcaaacagatgaagctgagcattctggatagataatccgaatttttgcatcagataaaaggtgtaatagctgctgatgctcgccatatagaaatatttgctgaaaatgaggattaacagaatgctgaccgccagtacaactttattgcgcggcagtggattgataatcgtcgctttgggttttcctttattcattcggtgctgtgcgctgtaccaacggctgatttgcgccaacaccacgatcgccagcagtgccgcaagcacaaaccaggcaacgttgcctttgccataaggcgcgataatcaccgccgccagcaagggtcccagggaactgccaaagttgccgccgacctgaaagatagattgcgccaggccatgccgcccgccggaagccatacgggccacgcgagaagattccggatgaaagacgctactaccggtaccgaccagcgccgccgccagcagaactgcgccaaaactgcccgccagcgcaagcagcaccagaccgcttaaggtaaagcacatgccaattggcaagctccatggcatcggatatttatcggtccagtagccgaccactggttgcagtaggctagaggcgagctggaaggtgagggttatcatgccaatctgcataaatgtcagagaaaattcactctgaagcagcggataaatcgccagaatcaggctttggatcatgtcgttcagcagatgactgaggctgatagcacctaaaataccaaagcttgttcgggccttggtcgtactcgcagccgcgcccgccacaggctggggttgttcactcattgccataggaaagtcactttttcagggttgcgatgtaaagaatgatcttatttgtgattattaccagactaacatacctgtatgcgtcgtctgaaggaagtctcaacgccgaatacagaatttctaatctggatgcagatttatcttcaccggacgcagacttgtctatgatgtcgcgtcatactatttttcaacacgttgaaatcaggtcagggagagaagtatgaaattattgcagcggggcgtggcgttagcgctgttaaccacatttacactggcgagtgaaactgctctggcgtatgagcaggataaaacctacaaaattacagttctgcataccaatgatcatcatgggcatttttggcgcaatgaatatggcgaatatggtctggcggcgcaaaaaacgctggtggatggtatccgcaaagaggttgcggctgaaggcggtagcgtgctgctactttccggtggcgacattaacactggcgtgcccgagtctgacttacaggatgccgaacctgattttcgcggtatgaatctggtgggctatgacgcgatggcgatcggtaatcatgaatttgataatccgctcaccgtattacgccagcaggaaaagtgggccaagttcccgttgctttccgcgaatatctaccagaaaagtactggcgagcgcctgtttaaaccgtgggcgctgtttaagcgtcaggatctgaaaattgccgttattgggctgacaaccgatgacacagcaaaaattggtaacccggaatacttcactgatatcgaatttcgtaagcccgccgatgaagcgaagctggtgattcaggagctgcaacagacagaaaagccagacattattatcgcggcgacccatatggggcattacgataatggtgagcacggctctaacgcaccgggcgatgtggagatggcacgcgcgctgcctgccggaagcctggcgatgatcgtcggtggtcacagccaagatccggtctgcatggcggcagaaaacaaaaaacaggtcgattacgtgccgggtacgccatgcaaaccagatcaacaaaacggcatctggattgtgcaggcgcatgagtggggcaaatacgtgggacgggctgattttgagtttcgtaatggcgaaatgaaaatggttaactaccagctgattccggtgaacctgaagaagaaagtgacctgggaagacgggaaaagcgagcgcgtgctttacactcctgaaatcgctgaaaaccagcaaatgatcagcctgttaagtccgttccagaacaaaggcaaagcgcagctggaagtgaaaataggcgaaaccaatggtcgtctggaaggcgatcgtgacaaagtgcgttttgtacagaccaatatggggcggttgattctggcagcccaaatggatcgcactggtgccgactttgcggtgatgagcggaggcggaattcgtgattctatcgaagcaggcgatatcagctataaaaacgtgctgaaagtgcagccattcggcaatgtggtggtgtatgccgacatgaccggtaaagaggtgattgattacctgaccgccgtcgcgcagatgaagccagatagtggtgcctacccgcaatttgccaacgttagctttgtggcgaaagacggcaaactgaacgaccttaaaatcaaaggcgaaccggtcgatccggcgaaaacttaccgtatggcgacattaaacttcaatgccaccggcggtgatggatatccgcgccttgataacaaaccgggctatgtgaataccggctttattgatgccgaagtgctgaaagcgtatatccagaaaagcagcccgctggatgtgagtgtttatgaaccgaaaggtgaggtgagctggcagtaatccgaaagtgccggatgtttgcatccggcacaatgcttaatcgcggcgggcgatatcagcaaatttggcatcgaggatctttgccagatcgcctgccgccagttcgatatccagtccgcgcttgccgccggaaacataaatagtggcaaattcttgtgcgggggcgtcgataatcgttggcagacgttttttctgccccagtgggctaatccccccaaccaggtatcccgtgctacgctgcgcgaccatcggatcggccatctcaactttcttggcacccagcgcttttgctacttttttaagatccagttgacctgcgaccggcgtaacggccacggcaaggtgtttcatatcaccgttcactgccaccagcagcgttttgtagacctgatccggattcaaacctaattttttgacgacttcatcgccaaaattggtttcagccggatcgtgctcgtaggtatggatttgaaagctaatcttgttttttcgagtaatttaactgcgggtgtcatggtaattttcctgccttaaacaaaaaaacgaagcaagcatacgcctgatggcggtccaaaaaaaagagtcatcttgcctaagagtattggcaggatggtgagattgagcgacaatcgagttacaccgtcgcttaaagtgacggcataataataaaaaaatgaaattcctctttgacgggccaatagcgatattggccatttttttagcgcaacatttgcggcaaattcccttctccatacaggtgtagtgcaccgaccgcgaccacatatcgccccggcggcatggcgcgtaatttatcccgccaggcgagatttcgctgatgcatcagcacatcgtacaggctctgactgaacgtattgggcagcgttatatcattattttgcggcggtgcattcagccaccagctcatcatttgttgcagcaaccgtgcgttggtatgccagtgggtcagcgtatcgtccagcagcgccagtcctttgtcagggagctggagcaacatggcaatctggttttcagccccttccagttcaatcacgggtttatgttgttgcttcgccgcctgcaatagctggtaatcgataccgtattctgcccgcagccccagtttttgtgcctgcgtcgcctgaagaaccatcgcgatttgccacagcggttgggtagaaaagagactgggagaaatgcccatctcctggctaatgtgctgcaggttttggagttgctcctcgctaatgcgctcttccagcgcctcgcaggcaggcaaattagcaaaaggcgtatcgctggtggaaacatccgcctcgacgatcagcgcatcggcgtttttgagctttttgagcaaacgggtgggcaggggagccatatcgtggctacccatatgaatactgccaatcagatgaaaatggcgattgccggggagggtgatatcgatggcaggccaggtgtaatgattaccgcgcagcgcggcccaaagcgtttttacccggtacaacagatccatacgacctccctttgtgaaatatcatgctagcgcgcggtgagggatggcgcaaatggagttggagacttgtttaatgtgtttgtatgattcagtatgttcttgcatcgctattcacaaggaagcaacagttaaaaaccatgaaacaggcaacaagaaaaccgacgacacccggagatattcttctctatgaatatctggaaccgctcgatttgaaaatcaatgagttagcagagttgctgcatgttcatcgtaatagcgtcagtgcactgatcaataacaatcgtaaactcactactgagatggcatttcgtctggcgaaagtttttgataccacagtcgatttttggctaaacctccaggcggcggttgatctttgggaagttgaaaacaacatgcgcacccaggaagaattgggacggattgaaacagtggctgaatatttggcacgccgtgaagagcgtgcaaaaaaggtcgcgtaaggccaaaacatcgcttcatctcgtaggccggataaggcgttcacgccgcatccggcatccgagcaccattgcctgatgcgacgcttacccgtcttatcaggcctacaaacttgtgcctgaaccgtaggccggataaggcgtttacgccgcatccggcatccgagcaccattgcctgatgcgacgcttacgcgtcttatcaggcctacaaacctgtgcctgaaccgtaggccggataaggcgtttacgccgcatccggcagtcatgcgtcgatgccaaatgcgccaccctaaagcagcgcatccgcaatgatgtacttattccttcggtttaaaccgcagcaaccggttggcgttactcactacggtaatgctgctgagcgccattgccgctccggcaactaccgggttaagcagtgttccagtgaacggccacaaaataccggcggcgaccggaataccgatactgttgtagataaacgcaccgagcaggttctgcttcatgttgtgcagcgttgcgcgggaaatagcgagcgcatccgcaacgcccatcaggctatggcgcatcagggtaatcgccgcggtttcaatggcaacatcactgccgccacccatcgcaatgccgacatccgcctgagccagcgctggcgcgtcgttaatgccgtcgcccaccattgccacctaacgtccttcactttgcagatgtttgatcgcttcggctttaccgtccggcagcaccccggcgatcacctcatcaatccctgcttctttggcgatcgcattggcggtggttgggttatccccggtcaacatcaccagacgatatcccgctttatgcaggcgttgcagcgccgccacgctatcactacgcaacggatcgcgtactgccagcagggctaccgctttcccgtcaaccgccagcagcacaggcgttgccccttggcttgcctgagcagtaatctccgcttcgatagctttggtaccaacctgttgctcatttaacagcgcctgattgcccagcaataacgcatgaccttcagcttcaccgctcacgcccagcccgcgcaatgtgcggaaaccgttgacctgcggtagctgcatatcacctgctttatcgaggatcgctcgtgccagcggatggctggaaccttgctccagtgccgccgccagacgcaatgcctgcgcttcatcaacatcagcaaatgttttcactgcgacaacctgcggcttcccttcagtcagcgtcccggttttatcgaacactacagtgtcgagtgtactggcgcgttgcagcgcgtcagcgtcccgcaccagcacgccaaactcagccgcccgcccgacgccggaaataatgctcatcggcgtcgccagccccagcgcacacggacaggcaataatcagtaccgtggtggcaatcaccagggtatagacaatctgcggtgccggaccaaagaaataccagattgccgcactgacaagcgcaataaccaccactaccggcacaaatacggcactgattttatccgccagctgaccgatttctggcttgctgctctgggcctggcgcaccatgcgaatgattcgactcagcgtagtatggctgccaaccgcactggcacgaaacagcacactgccgtcctgtaccactgtcccggcatggacgctatcgccttcgcctttttgctgcgggattggttcgcccgtcagcatcgcttcatccagccatgcttcgccctgggtaatctcgccatctaccggcacgcgatcgccggtcgtcaggcgcagcaacatacctggctgcacttctgccagaggcacgcttttttcaccttcgtcagtaaccaggcgtgccgtcggcggggttaaatcgagtaacttttccagcgccttagaagaacgctggcgtgcgcgcgcttccagcatatggccgagattgatcagaccgataatcatcgcgctggcttcgtaataaagatgtcgcgcttccatcgggaaccactgcggccacaggttgacgctcatgctatagagccacgccacgccagtacccagcgccaccagcgtatccatcgtcgccgcaccgttcagcaggcttttccatgcactgcggtaaaaatggccgccggcgaaaaccatcactgccagggttatcaggccgataaccaaccacaggctgcggttgtcagcggtgaccatcatgttatcgccgatcatcccccagaccatcaccgggatacccaccgccagtgcgacaattgcctgccagcggaagcgcttcatcgtagcgacggcggtttcttgctggcgctcgcggcgtttagcgtcatcttcaatcgcttccgcgccgtagcccgctttttccaccgcctgcactaaatcttgtggggaggcactgcccatcaccagcgcagtacgctccgccaggtttacccgtgcctgagtgacgcccggtacgctttgcagcgcattttgtacgcgggtgacacagctggcgcagctcatgccgctcagcagcaactgctggctgtcatcgtcatcggcggtcgctgccggaagcgcctcagaaaccgctgtcagtgcttcgctcgggatactactctccgccagcggtttagcctttgggtggcttacagatgcgtcataacccgcttgtttgatggtttcgatcagctgttctgcactggcagtcccggtaacgtgcgcttcagtgatagacacatccgcctgctcaacatccggacgctgttcaagactttctttcacgcgtttaacgcagtgaccgcaggacaggccgtccagggtcaggtcgatagtttgactcataaaacactcctttaagacagttttgactggctgtgataaaggttaaaccttccagcaaggggaaggtcaagaaattaataaaccaggcgggtaaaagtccgtaaagattaaaaaatcggctcgatttgcatcaggattagacatttatctctttgttttcctgtagttaagttgcgggtgctaagttaaatcaggatgcctgaaaatcggcaccggggtgaggaattacctcccgcatctataaaaaggagttaacaaaagatgttagatgcaaacaaattacagcaggcagtggatcaggcttacacccaatttcacagtcttaacggcggacaaaatgccgattacattccctttctggcgaatgtaccaggtcaactggcggcagtggctatcgtgacctgcgatggcaacgtctatagtgcgggtgacagtgattaccgctttgcactggaatccatcagcaaagtctgtacgttagcccttgcgttagaagatgtcggcccgcaggcggtacaggacaaaattggcgctgacccgaccggattgccctttaacagtgttatcgccttagagttgcatggcggcaaaccgcttagcccactggtaaatgctggcgctattgccaccaccagcctgattaacgctgaaaatgttgaacaacgctggcagcgaattttacatatccaacagcaactggctggcgagcaggtagcgctctctgacgaagtcaaccagagcgaacaaacaaccaacttccataaccgggccatagcctggctgctgtactccgccggatatctctattgtgatgcaatggaagcctgtgacgtgtatacccgtcagtgctccacgctcctcaatactattgaactggcaacgcttggcgcgacgctggcggcaggtggtgtgaatccgttgacgcataaacgcgttcttcaggccgacaacgtgccgtacattctggccgaaatgatgatggaagggctgtatggtcgctccggtgactgggcgtatcgtgttggtttaccgggcaaaagcggtgtaggtggcggtattctggcggtcgtccctggagtgatgggaattgccgcgttcagtccaccgctggacgaagatggcaacagtgttcgcggtcaaaaaatggtggcaagcgtcgctaagcaactcggctataacgtgtttaagggctgatcatgatgaacacggaaggtaataacggtaacaaacctctcggtctatggaacgtcgtttccatcggcattggggcaatggtgggggcggggatcttcgcgctgctggggcaggctgcattgctaatggaagccagcacctgggtcgcctttgcttttggcggtattgtggcgatgttttccggttatgcctatgcgcgtctgggggcgagctatcccagcaatggcggcattatcgacttctttcgtcgcggattaggcaacggcgtctttagcctggcgctcagcttactgtacctgttgacgctggcggtgagcatcgccatggtcgcccgtgcttttggcgcttatgccgtgcagtttttgcatgaaggcagccaggaggagcaccttattttgctctacgcgttggggatcattgcggtgatgacgcttttcaactccttaagcaaccatgcggtagggcggctggaagtgatcctcgtcggcattaaaatgatgatcctgttattgctgattattgccggtgtctggagcctgcaaccggcgcatatttccgtctctgcgccccccagctccggtgcgttcttctcctgtattgggataactttccttgcctatgcgggctttggcatgatggcgaacgcggcggataaagtgaaagatccgcaggtcattatgccacgggcgtttctggtggcgattggcgttaccacgttgctttatatcagcctggcactggttttgcttagcgatgtaagcgcattagagttagaaaaatatgccgataccgccgtagcgcaggctgcttctccgctgctcgggcatgtgggttatgtgatcgtcgtcatcggcgctttactggcgacggctagtgccattaacgcgaacctgttcgccgtgtttaacatcatggacaacatgggcagcgaacgcgaactgccgaagctaatgaataaatccctgtggcggcagagtacctggggcaacattattgtcgtggtgttgattatgctgatgacggcggcactgaatttaggcagtctcgccagcgttgccagcgccacctttttgatttgctacctggcggtgtttgtggtggcgatccgcctgcgtcatgatattcacgccagcttgccgattcttatcgttggtacgttggtgatgttgttggtgatcgttggctttatctacagtctgtggtcccagggtagccgtgcgttgatatggattattggcagtctcttactcagccttattgtggcaatggtcatgaagcgcaataaaaccgtataacatctctctgtgcgcagtacttcctgtattattgtggtggcggtcgatattcgcactggcaaaaaaacgtgcttgaatatctgttgaaaccctttaacaaagcacaggaggcgttgcgcgaacgatgaacatcagcgatgtagcaaaaattaccggcctgaccagcaaagccattcgcttctatgaagagaaggggctggtgacgccgccgatgcgcagcgaaaacggttatcgcacctacacgcagcagcatctcaacgaactgaccttactgcgccaggcacggcaggtgggctttaacctggaagagagcggcgagctggtgaatctgtttaacgacccgcagcggcacagcgccgacgtcaaacggcgcacgctggagaaggtggcggagaacgaacgacacattgaggagctgcaatccatgcgcgaccagctgctggcactggcgaatgcctgccctggcgatgacagcgccgactgcccgattatcgaaaatctctccggctgctgtcatcatcgggcagggtgattaagagctgacggctcggatatgtagggttatcccttctatcgcaatgacttcaacatgcgtacctgcaccgagatcctcgctggcgctgacaggccaactactgtcaccgacgcgcatatgaccgcgcccgttgaccagcggagattccagcacaaaacgtcggccaatcagctgctgcccgcgctggtttaaatgactatcgctgtgcttttgttcgcgcacccgccggctcaaccatttccaccacagccaggcggcgagcagcgtcaggatggcaaacattaccccttgccactcccaacccagcggcaccagccagaccaccaggccggtaatcaccgctgccacgccgctccacaacaaataaccatttccgcccagcatctcggctgccagcagcaaaccgccgagactgagccagaaaatatgtggatgaacgaccattaactccatcatggctgagtccgtttgttggcgctgtctttcaccagctcggcaatcccggcaatgctccccatcaggctgctggcctctaatggcatcatcactactttgctgttactggaggaaccgatctgctgtaacgcttcggtgtatttctgcgctacgaagtagttcaccgcctgaatatcaccggaggcgatagcttcagacaccattttggtggcgcgggcttctgcttcggcggaacgttcacgcgcttcagcctgtaaaaacgcgctctgacgttcgccttccgctttcaggatttggctctgtttttcaccttcggctttgaggatttccgcctgacggatcccttccgcttcaagaatgtaagcgcgtttggtacgttccgctttcatctgcgcgttcatactagagataagctctgccggtgggcgcacgtcgcgaatttcaatacgggtgactttaatcccccacgggttggtggcttcatcgacaatacgcagcaggcgactgttgatgctgtcgcgctgagagagcatttcgtcaagttccatactacccagcacggtacggatgttagtcatggtcaggttgatgatcgccagctccagattgctgacttcataagccgcgcgcggcgcgtcaatcacctgaataaagcacacggcgtcgatggtaacgttggcgttatctttgctgataacttcctgggaagggatatcgagcacttgctccatcatattgatcttgcgaccaatgcgatccataaacggcaccaccagactgagccccggctgtaacgttttggtatagcgaccaaagcgttctactgtccactgatagccctgcggtacgattttgacacccgcgccgacaatgaccagcgcgacaaaaatgagaatcgggataaagataagcatcggaaaaacctcctgttgtaccgtccataatcagcaaaattgctgcttgattaaacaaattatacctgattactgaaagagagttcccccttattcctgcgaaggataaactgtttttagtaaaaatcagaaaaagggaacagcgatgcaggaaaatagtcctttgcttcagctacaaaacgtaggatatctggcgggtgatgcgaagattcttaataacatcaattttagcctgcgtgctggcgaatttaagttaattaccggtccttctggttgtggcaaaagtacgctgctaaaaatagttgctagtttgatcagcccaaccagcggaacgttactgtttgaaggtgaggatgtcagcacactaaagccagaaatctaccgccaacaagtctcttactgcgcccagacaccgacgctgtttggcgatacggtatacgataatctgatctttccctggcagatccgtaaccggcagcctgacccagccatttttctcgattttctcgaacgcttcgccttgccggacagcattttgacgaagaatatcgccgagctatctggtggtgaaaaacaacgcatcagtttgattcgtaacctgcaatttatgccgaaggttttattgctggatgaaataaccagtgcgctggatgaaagtaataaacataacgtcaatgagatgatccatcgttatgtgcgcgagcaaaatattgccgtgctgtgggtgacacacgataaagacgaaattaatcatgcggataaagtgattacactgcaaccgcatgccggagaaatgcaggaagcacgctatgaactcgcataactaaagaaatgcaggaagcacgctatgaacagccataatattactaacgaaagtttagcactggcattaatgctggtggtggtggcaatcttaattagccataaagaaaaactggcgctggagaaaaatattctctggagcgtcgggcgagcgataattcagctgattattgtcggctatgtgctgaagtatattttcagcgtggatgatgccagcctgacattattgatggtgttatttatctgctttaatgcggcgtggaacgcgcaaaaacgcagtaaatatattgctaaagcttttatcagtagctttattgccattacggtcggggcgggaattaccctggcggtgctgattctcagtgggagcattgaatttatcccgatgcaggtgatccctatcgccgggatgattgccggtaacgccatggtagcggtggggttgtgttacaacaatttagggcaacgggtcattagcgaacagcaacagattcaggagaaactgagtcttggtgcgacgccgaagcaggctagtgcgatattgattcgcgacagtattcgcgcggctttaattccgacggtcgatagtgcaaaaacggttggcttagtgagtttaccaggaatgatgtccgggctgatatttgccgggattgatccggtgaaggcgattaaatatcagattatggtgacctttatgctgctcagtaccgccagcttgagcaccattattgcctgctatttaacctatcgtaagttttataatagccgccaccagttggtggtgacgcaattgaagaagaaatgatgcgatgccggatgcgcagcatcgcatccggcgttgtggttcatgtgccgatcaacggaatatcaatacaacaatgcatacagctggcggcgatacttgctcgccagtgcatcacccgtacccagcgcagcgaggatctcctggaacgttttacgcgtctgaccgtctgcggcggtgagatctttacgcagatgcccgaacagcaactccagcgcctcttcattgcgcccaacctgatgcagttgcagcgccagttgcgtcgccagtgcggcatcttctggattctccgccacctgctgttgcaactgttgaatttccggcgtatcagccgcctgcttcagcagttcgatttgcgccaccagcccctggtagcgggtgtcctgatcctgcaacggaatggttttcagcaccgcttccgcatcttcagaacggttcagcgcaatcagcgtttctgccagcagcaggccgatctccccgttctgattgctcaactgccaggcgtctttcagcaatggcagggcatcggtgtaattgctttcctgcatcagttgcatcgcctgctgcgctttcagctcttcttcgcgcggcagcactttatccagcagggcgcggatcgcctcttccggttgcggcccctggaagccatctaccggttgcccgttctggaacagatacacggtcggaatcgcacgcagaccaaactgcgcggcaatcatctgctccgcgtcgcagtccagcttcgccagaataaattgcccgttgtactgcgccgcgaggctttccagaattggggttaactgcaaacagtgctggctacgttcagaccaaaaatagaacagcaccggagtggtcatgctctgttcaagaacctgttgcaggttagattcgttaatgttgacaatattttctacggacatggagtcgctctctgttgtcgatattttctttgacatgggggcttaagcgcgcgcttcaactcacccctgcaatattttgtccatcacgcgccccggcagcaggcgcttaagcaccattaccgcccaggtcaccagcgtcaccggatagcgcatcttcggcttctcgctaataaaagcatggcgtactttgtccaccaccgcttccggtcccaacgtaaagcgggcggcgatgccgggattttcgactggtttatcactttgcgtctggttgacgttgtcggtgaagcgagtacgaatgggaccgggttcgatcaggctgactttaattccgctgtggcgcagctccatgcgcagtgcatcactccacgcctccagcgcatatttactggccgcgtaagcgccacgacccggcgtggagattaatcccatcacgctacttgtcatcacaatacgcccttcaccgtgcggtaacatcgcgggtaacaggcgcatggtgagctggtgtgcgccgaaaaagttggcggaaaactgctgttccatctgcgcacggctgatggtggaaagggggccatacatgccgaatccggcattgttaaagatcccatacagacaattatcggtcagggcgatcacctcgtcggctgcgcgatcaacactttctggactatccagatcgatcaacacgccggtaaatcccatgctgttcatgcgctcaacatcatccggtttccggcaacctgccagcacatgaaaaccctggcgttttaattcgagcgcgctttccaggccaattccactggaacatccggtaattaagacgcttttttgcataactttacctgtcaggatctccgttgctttatgagtcatgatttactaaaggctgcaacttatttaactgtcatgatttactaaaggctgcaactgcttcgccatccagtcggcaataaacggctgggcgtcgcggttgggatgaataccgtcatcctgcatccattgtggcttgaggtagacctcttccataaaaaagggcagcagcggaacatcaaactctttggcgagtttggggtaaatggcgctaaaggcttcattataacggcgaccatagtttgcaggcagacgtatttgcattaacaatggttcagcgttggcggctttgacatcctgcaaaatctggcgcagcgtttgctcggtttgctgtggctgaaaaccacgcaaaccgtcattgccgcccagttcaaccagcacccaacgcggctgatgctgtttcagcagagccggaaggcgcgccagtccttgttggctggtgtcgccgctgatgctggcattaactacgctcgttttactctgccacttatcattcaacaaggcaggccaggccgcgctggcagacattcgatacccggcgctcaggctatcacccagaatcaataacgtgtccgctgcggcggcacggaaggttaacaggaccaggaacaggaagggcaaatgccagcggaaaacattgttgaagttcatcatcttaagaagtccgtcggtcagggggagcatgaactctccatcctcaccggagttgagctggttgtcaaacgtggcgagaccatcgcactggtgggcgagagcggaagcggtaagagtaccttgctggcgatcctcgccgggcttgatgacggcagcagtggcgaagtgagtctggtgggacaaccgctacataatatggacgaagaagcgcgggcaaagttgcgcgcgaagcacgtcggctttgtttttcagagttttatgttaattcctacccttaacgcgctggaaaacgtcgagcttccggctctgctgcgcggtgagagtagcgcggaaagtcgtaacggggcgaaagcgttgctcgaacagttagggctgggtaaacgtctggatcatcttccggcacagctttccggcggtgaacagcaacgagtggcgctggcacgagcctttaatggtcgacctgatgtgctgtttgccgacgaacccaccggcaaccttgaccgccagacgggcgataaaattgccgacctgctgttttccctcaaccgtgaacatggcaccacgttgattatggtgacccacgacctgcaactggcggcacgctgcgaccgctgcttacggctggtgaacgggcagttgcaggaggaagcatgattgcacgttggttctggcgcgaatggcgtagcccgagcctattaattgtctggctggcgctaagcctggcggtggcctgcgtgctggcgctgggcaatatcagcgatcgcatggagaagggcttaagccagcaaagccgtgagtttatggcgggcgatcgggcgttgcgcagtagtcgcgaagtgccgcaagcgtggctggaggaagcgcaaaagcgcggcctgaaagtcggcaagcagctgactttcgccacaatgacctttgcaggcgacacaccgcagctggcgaacgtcaaagcggtggatgatatctacccgatgtatggcgatctgcaaactaatccccctggcctgaaaccgcaggcgggcagcgtattgctggccccacgcctgatggcactgcttaacctgaaaacgggcgacaccattgacgtgggcgatgccaccttgcggattgccggagaagtgattcaggaaccggattccggttttaaccccttccagatggctccgcgtctgatgatgaatctggcggatgtcgataaaaccggagccgtgcagccggggagtcgggtcacctggcgttataaattcggcggcaacgagaaccagctcgacggctatgagaaatggttgttacctcagcttaaacccgaacaacgctggtacggtctggaacaggacgaaggcgcgctggggcgaagcatggaacgcagccaacagttcctgctgcttagcgcgcttctgaccttgctgctggcagtggcagcggtggcggtagcgatgaatcattactgtcgcagtcgctacgatctggtggcgatcctcaaaacgctgggggcagggcgagcgcaactgcgtaagctaatcgtcggtcagtggttgatggtgctgacgcttagtgccgttaccggtggggccataggcctgttgttcgaaaacgtgttgatggtgctgctcaagcccgttctgcctgctgcactaccgccagccagcctctggccgtggctgtgggcgcttggcaccatgacggtcatcagcctgctggtggggctacgaccatatcgcttgttgctggcaacgcagcctttacgcgtattacgtaatgatgtggtagcgaacgtctggccgctgaagttttatctgccgattgtcagtgtggtggttgtgctgctgctcgccggattaatgggtggcagcatgctgctttgggcggtgctggcgggcgcggtagtactggctttgctgtgcggtgtgctgggctggatgctgctgaatgtacttcgccgcatgacgctgaaaagcctgcctctgcgcctggcggttagccgcctgttacgtcagccgtggagtacgttaagtcagcttagcgcatttagcctctcctttatgctgctggcactgctgctggtgttgcgtggcgatctgctcgaccgctggcagcagcagctacctccagaaagcccgaactactttttaattaacatcgccacagaacaggtagcaccgctaaaagcgttcctcgcggaacatcagatagtcccggaaagcttttatccggtggtgcgggcgcggctgacggcgattaacgataagccgacagaaggtaatgaagatgaggcgcttaaccgcgaactcaatcttacctggcaaaatacgcggcccgatcataatccgattgtcgccggtaactggccgccaaaagccgatgaagtgagcatggaagaggggctggcgaaacgcttaaacgttgccctcggtgataccgtgacttttatgggcgatacccaggagttccgcgctaaagtgaccagcctgcgcaaagtggactgggaaagtctgcggcctaatttctattttattttccctgaaggggcattagacgggcaaccgcagagctggcttaccagtttccgctgggagaatggcaacggcatgttgacacaactcaaccgccagttcccgaccattagcctgttagatattggcgcgattttaaaacaggtcggtcaggtgctggagcaggtaagtcgggcgctggaagtgatggtggtactggtcaccgcctgcggtatgttgctgttgctggcacaggtgcaggtgggaatgcgtcagcgtcatcaggagctggtggtgtggcgcacactcggtgcggggaaaaaactgctgcgtaccacgttgtggtgtgagttcgccatgcttgggtttgtttccggcctggtggccgcaattggtgcggaaacggcgctggcagtgttgcaggcgaaagtgtttgattttccgtgggagccagactggcgattgtggattgttctgccgtgcagcggagcgctgctgctgagccttttcggcggctggctgggtgcgcgactggttaagggtaaggcgctgttcaggcagtttgcggggtgatgagagtccctcattaccgcgccttaacccattccgccacttccgcccactcaccgcgaaagacaactttttccgcttttttctcaagctgatagcgatacatcgggtcgtaatattcttcaagtaacggcaccagccaggccagatgaccgtcggtgctgccggtggtgagttgcgttgtcagtgctgcatccagccttgcagccagttcgttatagcgctgtagccccagccgacgcttaatcgcgctaagtccgtgatgcaggtattcgcaatactcctgccagccctgttcgtcgccgtacgcgtgggtaaaatcatgatgcatacgcaagaaatactcttcgttcaggcgctcaagacggatctcaaacggatcttctaccaccgcaatcgccgcctgagtcattcgctcgcgcaggcattccggcaggtgattgctaccgatcatccggctttcgtcttccagcacccacaggcgcaaattctgacgggcgtcggtttttagcatttcggcagccagcaggttttcaaaactcgcctggctaagttgtggttgtaacgtgcgaccaaacgcgctaccgcgatgacgcgccaacccttccagatcaacaccgttcggctgttgctgcactaacagcgttttaccgctgccggtacaaccgccaatcagcactatcggtttttgtgccagttcaatagtcgcctgaatcgcggtctggcgcagtgccttataaccgccttccaccagcggataatcaatccccgctgcatgcaaccagctttgcacaatatgactgcgctgaccgccacgggcgcagcagagaataccttgcggattttgcaggcacgctgcccgccaggcgtccatgcgctgctgacgaatttcacccgccaccagtttatgtcccagcgccagcgctgcgtcactgccttgctgtttatagcaggtgccaacggcggcgcgttcatcgttattcattaacggcagattgatagcggcgggcattgcgccgtgctcaaactcgataggggcgcgaacatcaataatgggcgtatcagcaatcagcagggcacgatagtcctgttccgtgtgtctctcttgcatagttaaaagtgaacctcaaatcagcttgcgcgctattttacgcgccaacgcgcaaggaaacttgatttttaactgcgtgggttgccgaaaatttctaaaaatccgctgatttccggcctgcgctgggtaaacaaggtcacaatatcttctaccgctttgccgctgccaaatttgcgccatgccagactcaatgggctaggagggcgcatcgttgggattacccggctgaccagttgttgattatcgatcatactctggcaaaggctttttggcaaaaaaccaatgccaacgcccgccagatgggcggcgattttcgtttccatatcgggaacaataatctctttttgccctggcaatcgccaggcgacgcgtttggttaaggtgcgggcgctgtcttcaatattgaccgccggaaagcgccgcaactgcgcttctgttagcggctcttcaacgttcgccagcggatgatccgccgccatgacaaagcgccattgcacgcttcctaagggatcaagactaaaggtatttgccagcgcctcagttcccgtgacgccgatagccaggctaaaaccttcgtacaataggctgtcccagacgcccatatagatttgtcgggagatgtgaaactgggtaaaggggtaacgctcattcagccacgccagcaactgggcgacggcctgggggttatagagcaggttgttgatgacaatattcacctggcgttccacgccatcattcacctgttgcagctcgcttggcatactttccagccagctcagccagtctctggcctgggaaagtagatgctcgccagccgctgtcaacgtcacgctgcgagtcgtacggaaaaacagcgctactccggtattctcttccagaagtttaatgcgataactgatcgtcgccgtggttttacataatcgttctgccgctttactaaaacttcctgtttcagcaaccgcaatgaaagtccgcaaggtttctggatcgaacatcttcaggtatccccttttaaatccgcaagttgcgtgattttcttatcctctgatttatcagtatttttacatgataaccctgttcaatttgtggactaaatctagttttggaaaaatattccaacttttgtattgatgttgttctcttaaggttttagattgcctgttattgaaaccaagctgaccggtcggcggtggttgaacggaattatgttacaaggacaaaaagatgaaacttcaggtattaccgttaagtcaggaagcctttagtgcttatggcgacgtaatcgaaacgcagcaacgggattttttccatattaacaatggcctggtggagcgttaccacgatttggcgctggttgagattcttgagcaagactgtacgcttatcagcattaaccgcgcgcaaccggcgaatctgccgctgaccattcacgaactcgaacgtcatccgctgggtactcaggcctttatcccgatgaaaggtgaggtgtttgtggtggtcgtggcgttaggtgacgacaaaccagacctgagtacgctgcgggcgtttatcaccaacggcgaacagggagtgaattaccatcgtaacgtctggcatcacccacttttcgcctggcagcgcgtcaccgattttctgaccatcgatcgcggcggcagtgacaactgtgatgttgaaagtattcctgaacaggaactctgttttgcgtgacgcctgcaaccgacttgcataagataaactaattgttcattgtttatgctcacttgtaggtcggagttaacgtaggtatgacggaagttagacggcgcggcaggccaggacaggcggagcctgtggcacagaagggcgcacaggcgttagagcggggaattgcgattctgcaatatttggaaaaaagtgggggaagtagcagcgttagcgatatttctctcaatctggatttgccgctctccacgacctttcgcttgctgaaggttttacaggcagcggattttgtctatcaggacagtcaattaggctggtggcatataggattaggtgtctttaacgtcggtgcggcgtacatccataaccgcgatgtcctctccgtcgccgggccgtttatgcgccgcctgatgttactttccggcgaaacggtcaatgtcgcgatccgtaacggcaatgaagcggtattaattggtcagttagagtgtaaaagcatggtcaggatgtgtgcgccactgggcagtcgtctgccactgcatgcttccggtgcgggcaaagcgctgctttatccgctggcggaagaggagttgatgagcatcattctgcaaaccggtttgcagcagtttacgccaactacgcttgtggatatgcccaccttgctgaaggacctggaacaagcgcgtgaactgggctataccgtagataaagaagagcatgttgtaggtctgaattgcatagctagtgcaatttacgatgatgtcggtagtgttgttgccgctatctccatctccgggcctagtagtagactgacagaagatcgttttgtcagtcagggtgagctggtcagagacaccgcccgcgatatcagcacggcgttgggactgaaagcacatccataatgtctgtcgcatcccgctctgcggagcgggtttttttgacaaaatttgaaagttggaaaaattttccaataaatagaggtaggaataaaatggcaaaaatgagagccgttgacgcggcaatgtatgtgctggagaaagaaggtatcactaccgccttcggtgttccgggagctgcaatcaatccgttctacagtgcgatgcgtaagcacggcggtattcgtcacattctggcgcgtcatgtggaaggtgctagccacatggcggaaggttatacccgcgcaacggcagggaatatcggcgtatgtctggggacttccggtcctgcgggcacggacatgatcaccgcgctctattccgcttctgctgattccattcctattctgtgcattaccggccaggcaccgcgcgcccgtctgcataaagaagattttcaggccgtagatattgaagcaattgctaaaccggtcagcaaaatggcggttacagttcgtgaagcggcgctggtgcctcgcgtgctgcaacaggcatttcacctgatgcgttctggtcgtccgggtccggtactggtggatttaccgttcgacgttcaggttgcggaaatcgagtttgatcctgacatgtacgaaccgctgccggtctacaaacctgctgccagccgtatgcagatcgaaaaagctgtagaaatgttaatccaggccgaacgtccggtgattgttgccgggggcggggtaattaatgctgacgcagctgcactgttacaacagtttgctgaactgaccagcgttccggtgatcccaacgctaatgggctggggctgtatcccggacgatcatgaactgatggccgggatggtgggtctgcaaaccgcgcatcgttacggtaacgcaacgctgctggcgtctgacatggtgtttggtatcggtaaccgttttgctaaccgtcataccggcagcgtagagaaatacaccgaagggcgcaaaatcgttcatattgatattgagccgacgcaaattggtcgcgtgctgtgtccggatctcggtattgtctctgatgctaaagcggcgctgacactgctggttgaagtggcgcaggagatgcaaaaagcgggtcgtctgccgtgtcgtaaagaatgggtcgccgactgccagcagcgtaaacgcactttgctgcgcaaaacccacttcgacaacgtgccggtgaaaccgcagcgcgtgtatgaagagatgaacaaagcctttggtcgcgatgtttgttatgtcaccaccattggtctgagtcaaatcgctgcggcacaaatgctgcatgtctttaaagaccgccactggatcaactgtggtcaggctggtccgttaggctggacgattccggctgcgctaggggtttgtgccgctgatccgaaacgcaatgtggtggcgatttctggcgactttgacttccagttcctgattgaagagttagctgttggcgcgcagttcaacattccgtacatccatgtgctggtcaacaacgcttatctggggctgattcgtcagagtcaacgcgcttttgacatggactactgcgtgcaactcgctttcgagaatatcaactccagtgaagtgaatggctacggtgttgaccacgtaaaagtagcggaaggtttaggttgtaaagctattcgggtcttcaaaccggaagatattgcgccagcctttgaacaggcgaaagccttaatggcgcaatatcgggtaccggtagtcgtggaagttattctcgagcgtgtgaccaatattagcatgggcagcgaactggataacgtcatggaatttgaagatatcgccgataacgcagcggacgcaccgactgaaacctgcttcatgcactatgaataagggagataaataatgttacgtttctctgctaatttaagcatgttatttggagaatatgattttctcgcccgttttgagaaagctgcgcagtgtggttttcgcggcgttgaatttatgtttccttatgactacgacattgaagaattaaaacatgtgctggcgagtaataaactcgaacatacgctgcacaatttaccggcgggtgactgggcggcgggggagcgcggtattgcctgtattcctggccgtgaagaagagtttcgggatggcgtagcagcagcgattcgttatgcccgtgcgctgggtaataaaaaaattaactgtctggtcggtaaaacgccggctggtttcagcagtgaacagattcacgcaacgcttgtagaaaacctgcgttatgccgcgaatatgctgatgaaagaagatattttattactgattgaacctattaaccattttgatattcctggtttccatctcaccggaactcggcaggcgctgaaattgattgatgatgttggttgctgcaatttgaaaattcagtatgacatttatcatatgcagcggatggaaggtgaattaaccaacaccatgactcagtgggctgataaaattggtcacctgcaaattgccgataatccgcatcgcggcgaaccgggaaccggagaaattaattatgattatctctttaaggtaatcgaaaattctgactacaacggttgggttgggtgtgaatataaaccccaaaccaccacggaagccggtttacgctggatggatccgtaccgttaaaacgtaacgctattcagacaatgcttttttaggccgctaagttggcaggggatcgtgttgtctgaattcaggaaaagcgaaatttaaaagaggttaattatgaaactgggatttattggcttaggcattatgggtacaccgatggccattaatctggcgcgtgccggtcatcaattacatgtcacgaccattggaccggttgctgatgaattactgagtctgggtgccgtcagtgttgaaactgctcgccaggtaacggaagcaagcgacatcatttttattatggtgccggacacacctcaggttgaagaagttctgttcggtgaaaatggttgtaccaaagccagcctgaagggcaaaaccattgttgatatgagctccatttccccgattgaaactaagcgtttcgctcgtcaggtgaatgaactgggcggcgattatctcgatgcgccagtctccggcggtgaaatcggtgcgcgtgaagggacgttgagcattatggttggcggtgatgaagcggtatttgaacgtgttaaaccgctgtttgaactgctcggtaaaaatatcaccctcgtgggcggtaacggcgatggtcaaacctgcaaagtggcaaatcagattatcgtggcgctcaatattgaagcggtttctgaagccctgctatttgctagtaaagccggtgcggacccggtacgtgtgcgccaggcgctgatgggcggctttgcttccagtcgtattctggaagttcatggcgagcgtatgattaaacgcacctttaatccgggcttcaaaatcgctctgcaccagaaagatctcaacctggcactgcaaagtgcgaaagcacttgcgctgaacctgccaaacactgcgacctgccaggagttatttaatacctgtgcggcaaacggtggcagccagttggatcactctgcgttagtgcaggcgctggaattaatggctaaccataaactggcctgatacccgcaataaaaatggccgatatcagaaaatgaatcggccagcaatattaaaaaagaaagcagccaaagatgttgctagtgtattaaaaataatatttttattttatttgttcctcatagctagattaaaacaacgttatagcatacgtgaaattaagagggatttatggaacatcagagaaaactattccagcaacgcggctatagcgaagatctattgccgaaaacgcaaagccagcggacctggaaaacatttaactattttaccttatggatgggtagcgttcataacgttcccaattatgtgatggtcggcggcttttttattctcggcttgtctacctttagtattatgctggcaattatcctcagcgcctttttcattgccgcggtaatggtattaaacggtgctgcgggcagtaaatacggtgtgccttttgccatgatcctgcgtgcttcttacggtgtacgtggtgcactgtttcccggattattaaggggcggaattgccgccatcatgtggtttggtttgcaatgttacgcggggagtctggcctgcttgattctgattggcaaaatctggccgggatttttaactctcggtggtgatttcactctgttaggcctttctctaccgggcttaattactttcttaatcttctggctggtcaacgttggtataggttttggcggtggcaaagttttaaataaattcactgccattcttaacccgtgcatctatatcgttttcggcggtatggcgatttgggcgattagtctggtcgggatcggtccaatctttgactacattccgagcggtattcagaaagcagaaaacggtggcttcctgttcctggtggtgattaacgcggtagttgcggtctgggcggcaccggcggtgagcgcatccgactttacgcaaaacgcccacagctttcgtgagcaggcgctggggcaaacgctgggtttagttgtggcctatattctgtttgcggtcgccggggtatgtattattgccggagccagtattcactacggcgctgatacctggaacgtgctggatattgttcagcgttgggacagcctgttcgccagcttctttgcggtactggttattctgatgacaactatctccactaacgcgaccggtaatattattccagccggttatcagattgccgccattgcaccgacaaaactgacctataaaaacggcgtactgattgccagtattatcagcttgctgatctgcccgtggaaattaatggaaaatcaggacagcatttatcttttcctcgatattatcggcggaatgcttggtccggtaattggtgtcatgatggcgcattattttgtggtgatgcgcggacaaattaatcttgatgaactgtataccgcacctggcgattataaatattacgataacggttttaacctcactgcgtttagtgtaactctggtggccgttattttatctcttggcggtaagtttattcactttatggaaccgttaagccgtgttagttggtttgtcggcgtcatcgtcgcctttgcggcctacgccttattaaagaaacgtacaacagcagaaaaaacaggagagcaaaaaaccataggttaattaatcccgatattgaacattgagttaaaaaccaatctgtattttacaaggagtttgttatgtcttttgatttaatcattaaaaacggcaccgttattttagaaaacgaagctcgcgttgtagatatcgccgttaaaggcggaaaaattgctgctatcggtcaggatctgggcgatgcaaaagaagttatggatgcgtctggtctggtggttagcccgggcatggttgatgcgcacacccatatttctgaaccgggtcgtagccactgggaaggttatgaaaccggtactcgcgcagcggcaaaaggtggtatcaccaccatgatcgaaatgccgctcaaccagctgcctgcaacggttgaccgcgctagtattgaactgaagttcgatgccgctaaaggcaagctgactattgatgcggcacaactcggtggcctggtgtcttacaacatcgaccgtctgcatgagctggatgaagtgggcgttgtcggcttcaaatgcttcgttgcgacctgtggcgatcgcggtatcgacaacgacttccgtgatgtaaacgactggcagttcttcaaaggtgcgcagaagctgggcgaactgggtcagccggtgctggtgcactgcgaaaacgcgctgatttgtgacgaactgggcgaagaagcgaagcgtgaaggtcgcgtaaccgctcatgactatgtggctagccgtccggtatttaccgaagtggaagcaattcgccgcgtactgtatctggcgaaagttgctggttgccgtctgcacgtttgccacgtcagcagcccggaaggtgttgaggaagtgactcgtgcacgtcaggaaggtcaggacgttacttgtgaatcctgcccgcattactttgtactggataccgatcagttcgaagaaatcggtactctggcgaagtgtagtccgccgatccgcgatctggaaaaccagaaaggcatgtgggaaaaactgtttaacggtgaaatcgactgcctggtttccgaccactctccatgcccgccggaaatgaaagccggtaacatcatgaaagcatggggcggtatcgccggtctgcaaagctgcatggacgtgatgttcgatgaagcggtacagaaacgcggtatgtctctgccaatgttcggcaaattaatggcgactaacgcagcagatattttcggtctgcagcaaaaaggccgtatcgccccaggaaaagatgccgacttcgtcttcattcagccgaatagcagctatgttcttaccaatgacgatctggaatatcgccacaaagtcagcccgtatgttggccgtaccattggcgcgcgtatcacgaaaaccatcttacgtggtgatgtgatttacgacattgaacagggcttccctgttgcgccgaaaggtcaatttatccttaaacatcagcagtaatctggcccctgcaatgcccgtccttgcggcgggcattctccggttaaggtgtgtttatgttcaattttgcagtcagccgcgaaagcctgttaagtggatttcagtggtttttctttattttttgcaacacggttgtggttcctcctacgctactttctgcttttcagttgccgcaaagtagcctgcttacgctcacgcaatatgcttttcttgctaccgcactggcctgcttcgctcaggcgttttgcggtcatcgtcgcgctattatggaagggccaggtggcctgtggtggggaaccatccttactatcacccttggtgaagcaagccgcgggacaccgatcaacgatatcgccaccagcctggcagtggggattgcactctccggcgtgctgacgatgttgattggttttagcggattaggccatcgcctggcacggttatttacgccgagcgtgatggtcttgtttatgttgatgctgggcgcgcagctgaccactatctttttcaaaggtatgctcgggctgccgtttggcatagccgacccgaattttaaaattcagttaccgccgttcgcgctcagcgtggcggtgatgtgcctggtactggcgatgattatcttcctgccgcaacgttttgcccgttatggcctgctggtcggcaccataaccggctggttgttgtggtacttttgctttccttctagccacagcctctccggtgagttgcactggcagtggttcccgctcggcagtggcggtgctttgagcccgggaattattctgacggcggtgattacaggtctggtaaatatcagcaatacctacggtgcgattcggggcacggatgttttttatccgcagcagggcgcagggaatacgcgttatcgtcgtagctttgtggcgaccggatttatgacgctgataaccgtaccgctggcggtaattccatttagtccgtttgttagttccattggtttattaacccagactggcgattacacgcggcgtagctttatttatggcagcgttatttgcctgctggtggcgctggttcctgcactcacgcgactgttttgcagtatccctttacccgtgagtagtgcggtcatgctggtttcttatctgcctttactcttttccgcgctggtgtttagccagcaaataacgtttaccgctcgcaatatttatcgactcgcattgccgttatttgtcggcatatttttaatggcattaccgcctgtgtatctgcaagaccttccattaacgcttcgtcctctgctcagtaacggcttattggtcgggattttactggctgttcttatggataaccttattccgtgggaacgcatcgaataatttgttgaaaaaggattgataatgaagattgtcattgcgccagactcttttaaagagagcttaagtgcagaaaaatgttgtcaggcaattaaagccgggtttagcaccctctttcccgatgcgaactatatctgtttgccgatagcggatggcggcgaagggacggtggatgcgatggtcgccgcgacgggcggcaacatcgtgacgcttgaagtctgcgggccgatgggcgaaaaagtgaatgctttttatggccttaccggcgacgggaaaacggcggtgattgagatggcggcagcaagtggcctgatgctggtcgcgcctgaaaagcgtaatccgttgctggcctccagttttggtacgggggagttaattcgtcatgcgctggataacgacattcgccatattattctcggcattggcggcagtgcgacggtcgacggcggtatgggcatggcgcaggcgctcggtgtgcgtttccttgatgccgacggtcaggcgctggcggcaaacggtggtaatttagcgcgcgtggcaagcattgagatggatgaatgcgatccgcgtctggcgaattgccatattgaagtagcatgtgacgttgataacccgctggtaggggcacgcggcgcggcggcggtgtttggcccgcaaaaaggggcaacgccggagatggtcgaagaacttgaacaggggctgcaaaattacgcccgtgttttacaacagcaaactgaaattaatgtctgccagatggcgggcggcggcgctgcgggcggtatgggtattgcggcggcggtatttctcaatgcggatattaaaccgggcattgaaattgtgttgaatgcggtcaatcttgcgcaggcagtgcagggcgcagcactggtgattaccggggaagggcgcatcgacagccaaacggcaggcggtaaagcgccgctgggtgtggcgagcgtggcgaagcagtttaatgtaccggtgattgggattgctggcgtattgggtgatggcgtggaagtggtgcaccagtacggcattgacgcggtattcagcattttgcctcgtctggcacctttagccgaagtgctcgccagcggtgaaaccaatctcttcaacagcgcgcgaaatattgcctgcgccattaaaataggtcagggaattaaaaactaacccttacctttaaagcggatgcgatttatatcgcataagagtgcagtactcatgccggatgcggcatgagtaccatatccttcctgaaaatcgcgcaaattctatatattgcagagatcatgtaggcctgataagcgaagcgcatcaggcaatgttacaaaaaaagccacggtataaaccgtggcaaaatccaacatagctaaaaataatcaggcgagtggtatgacttaaatctctacgtcgcggttacaatctttgctgtaaatatagctgaacgcttcaccacgccctacaccataaccagcctgtaaagaataagcgcccataaagatgtaatcgccttttttcaccgggatccagttattgtcgaggttataaaccccctgaccggaaagaatataggcaccgtgttcctgaacgtgtgtttcgatataaccgtggctggcacctggtgcaaaagagaggatatgcatgttcatatcaaaacctaactctttgggcagaaaatccagcagaataacatcgtccatgccttcataatgaatgcgttccagttcgctggcattgccagaaaccagccacggtgcatagccttctaccggaacatagcggcgcttatataaaaagatttggctgtcttcggcctgggcgttaacaaacgtcattaaggagcctggcgggcaataaagatagccaccttcgcttaaggcaaatgttttgccttcggctttggcagtgatatttccagagatcacatacaggaacgtttcaatgccttcgccaccgaagccctgttggttgccaccgttttgatgcagtgtgaccagataatcaacaaaagaggcacccagctttggcgtggagaggattgtcgcgtcacaattttcaaagcccggaataatattttttaccagaccatccggggttaacagtgcgaaattaccgtgtttaacaatcgcacggttagccagtaaatcttcgcggtaaccggtgacgttatttaaatatcccatttatgactccttatttctgccaggcaagttgataaagcatgagtgccaacgttttgaccccttcggcaaggtcggtaatattggtgcgttccgccgggttatggctgatcccgttgatgctggggataaaaatcatgcaggttggtacgcgaggcgcgaaaatttgcgcgtcgtgcccggcaccactgtgcatcacccggtaattcagtttttctctttcacacaattctgtcagggtggcgaccagctccttattcatcggcacgggttcttcgtccatccataaatcgatatcaataccaatgtccatttcatcgcaaatcgcccgcatgtcgttttctaactgttgggtgaaatcgcgcagcacggcagcgtcggtatgacgacaatcaatggtgaacgtggttttacccggcaccacatttaccgtattcgggcgcggctctactttgccaaaggtcagaaccagcggatcgcccatccttttcgctttttcgacgctctgatggcaaatgcgactgaaagcgtaaactgtatcacgacgataacccatcggcgtggtgcctgcatggttactttcgccgttcagcgttaccgtataacgacgctgcccgacaattgcattcaccacgccaatactttgcccattactttccagcacacagccctgttcaatatgcagttcaacaaaggctttaatatcctgacgcggagttagtggggcgttcggaagagtaaatccgcaagccttcatcgcatcgacaaaactatttcctttggcatcacagatattccgcacgtcgtcaggattcgccagcccaaaaatatttttactgccccagaagacatacgggaagcggctgccttcttcttctgccatcgccaccacttcgaccgtacgtagcggcgcgccgtattgcgttttcagccagtcaattgccagccacgccgccagcgcgccgaattgcccgtcaaggttaccgccgttaaccacggtatcgatatggctaccgctcagaaccacttcctgtggatattcggtgccattcaggcgaccgtataaattccccacttcatcgaaacgtgtttccagcccgcttgctgccattctttttttaaattgctgctgggtttccagccattccgggctataaagtaaacgggtcatcccacccgctgggtcagcgccaaaagaggaaagccagggcagcgtttcttctatagcttgacggaaatgtgtaatcataagaaagtcctgtctcaataattattgcgcaaagggatttttcgtttcgtaactcgtgttataaagcgcgtcggaaattaaatactggtaaatatcatcaacaatttcgatgccttcgacggcggctttgcgttgtttaatatcctgatcctgtccgggataataaacctgattaaaaccgggcgcgggggtaatggcatttaattcgcgcatggtctggctaagatgttgacggaataattcgctggaggagaaaaagttcggattaataactatatgtaattgccccaaattacgccctgcgtgtaaatcgtcatacatgctactaacctgtcgcccgaacggtaagccgagtaagacgccactgaggacgtcaatcatcatcatcaggccatacccttttggcccggcggcggggagcagagcatgtaccgcgaacggatcggttgttggtacaccgtttttatcgaccgcccaggtatccgggatagacatattacggctgcgggcgtcgagcacttttccccatgcctgtacggtagtcgccatatcaaaggtaaggatctcgtcgccttctcccggcgcggcaaaggccagggggttagtaccgtagtaaatttccgcgccgccaaacggcaccaccattggatcggactggcacatgctaatgccaatgaatccggcgcgggctgcctgctgcacaaaataagagattgcgccgctgtgacccatccggctgataccgaccaccgcaacgccattttgctgggcggttttgatggcatgttccatacccattttcgccgcgacctgtccggcggcattgtcggcatgtaaaattgcgctgcacggcccggtttcctcaagacgaaactccggttcgcggttggtgccgcctttactaatgcgttccgcgtagtattccacgcgcaccgcgccatgagagtggatccctctggcatcggcgtaaaccaatacttcagccacggttgcagcgtgctcacgttttaacccagcctggcagagtttattctcaattagctggtggagtgtttcccgactgattttcatctgtcttcctttttaacgacggtgtgaagcatgactgcaattaacatacagggaaaatatctggattatgtgatccagacaggcaaaaaaatatagttagaatttatttgataatccgctcacttttaacctgatttttaaaacaacaacgcttattaaaaaataatgagtaatagcctggtggttatttgaattcttttgttaataattcctgtgtgatattcatcaccttatttactcgttgtcatcgataccgtaatcgccacattaacactgctcgtgcaattgccatgggtgcaatttttaaggagttgttatgatccacgcctttattaaaaaagggtgttttcaggatagcgtcagtttaatgattattagtcgaaaactcagcgaaagtgaaaatgttgatgatgtttccgtaatgatgggtacgcccgccaataaagcgttattagataccacaggtttctggcatgacgattttaataacgccacgccgaacgatatttgcgtggcaattcgtagcgaagcggcggatgcggggatcgcgcaggcgattatgcagcagcttgaagaggcgctaaaacaactggcgcaggggagtggcagcagccaggcgttgacgcaggtgcgtcgctgggacagtgcctgtcagaaattacccgatgccaatctggcgctgattagtgtggctggcgagtatgcggcggagctggcaaaccaggcgctggatcgcaacctcaacgtgatgatgttctccgataacgtcacgctggaagatgaaatccaacttaaaacccgcgcgcgggaaaaaggcttgctggtgatggggccggactgcggtacgagcatgattgccggcacaccgctggcttttgctaacgtgatgccggaaggcaatattggcgtcattggcgcttccggtaccgggattcaggagctgtgtagccagattgcgctggcaggggagggaattactcacgcgattggccttggcgggcgcgacctcagccgtgaagtgggcggcatcagtgcgctaacagcgctggaaatgctcagtgcagacgagaaaagcgaagtgctggcatttgttagtaaaccacctgccgaagctgtgcgtctgaaaattgttaatgccatgaaagcaaccggcaaaccgacggtggcgctgtttttaggttataccccggcggtggcccgcgacgagaatgtctggtttgcctccagcctggatgaggccgcacgcctggcttgcctgcttagtcgcgtcacggcgcgacgtaacgcaatagcgcctgtcagcagcggatttatttgcggtttgtataccggcggtacgctggctgccgaagcggcgggattacttgccggacaccttggcgtggaagccgacgatacccatcaacatggcatgatgctggacgccgatagccaccagattattgacctcggcgatgatttctacaccgtcgggcgtccccatccgatgatcgacccaaccttacgcaaccagttaattgccgatctcggcgctaaaccgcaagtgcgcgtgttgctgcttgatgtcgtgattggcttcggtgcgaccgccgatcctgccgccagcctggtgagcgcctggcaaaaagcctgtgccgcgcgtttagataatcaaccactgtatgccattgccacggtgacaggcactgaacgtgacccgcaatgccgcagccagcaaatcgccacgctggaagatgcggggattgcggtcgtgagtagcctaccggaagccaccttgctggcggcagcgttaattcatccgctcagccctgccgcacagcaacacacaccgagtttactggaaaacgtcgccgtgattaacatcggattacgcagctttgcgctggagctacaaagcgccagcaaaccggttgtgcattaccaatggagcccagtcgccggtggcaataaaaaactggctcgtttattagaacgtttgcaataaggggttcccatgtttacatcagtggcgcaagccaatgctgcggttatcgaacaaattcgtcgcgctcgtccacactggctggatgtgcaaccggcttcttcacttatcagcgaactaaacgagggcaaaacactgcttcacgccgggccgccaatgcgctggcaggagatgaccggacccatgaaaggggcgtgcgtgggcgcatgtctgttcgaaggttgggcgaaagatgaagcgcaggcgctggcaatactggagcagggggaagtgaacttcattccttgtcaccatgtgaatgccgtcgggccaatgggcggtattacttctgccagtatgccgatgctggtggttgagaacgtgaccgacggcaaccgggcgtactgcaacctcaacgaaggtatcggcaaagtgatgcgttttggcgcttacggcgaagatgtcctgactcgccatcgctggatgcgcgatgtgttaatgccagtattaagcgcggcgctggggcgcatggagcgcggtatcgatctcacggcgatgatggcgcagggcattacgatgggcgatgagttccatcaacgcaatattgcttcctctgcactgttaatgcgtgcgctggccccacaaattgctcgcctcgatcatgataaacagcacatcgccgaagtgatggatttcctcagcgtgaccgatcagttcttcctcaacctcgcgatggcttactgcaaggcggcgatggatgctggcgcgatgatccgcgcaggcagcatcgtcacggcaatgacccgcaacggcaatatgttcgggattcgggtaagcgggctgggcgaacgctggtttactgcgcctgtaaacactccgcaaggtctgtttttcaccggcttctcgcaggagcaggcgaacccggatatgggcgatagcgcgattaccgaaacctttggtatcggaggtgcggcaatgatcgcagcgcctggcgtaacgcgctttgtcggtgcgggtggcatggaagcggcaagagcggtatctgaagagatggcggaaatttaccttgaacgcaatatgcagttgcagatcccaagctgggattttcagggcgcgtgcctggggctggacattcgtcgcgtggtagaaaccggcattacgccactcatcaataccggtatcgcccataaagaggcggggatcgggcagattggcgcaggcaccgtgcgggcaccgctggcgtgctttgaacaggcgctggaagcactggctgaaagcatgggtattggttgaggaacgcgcaatgacgatcatccatcctctgcttgccagtagtagcgcaccgaattatcgccagtcctggcggttagcgggagtgtggcggcgggcgattaacctgatgacggaaagcggcgaactgttaacgttgcatcgtcagggtagtggtttcggccccggaggatgggtgcttcgccgtgcgcaattcgatgcgttatgcggtggattatgcggcaatgaacgaccacaggttgtggctcaagggattcgcctcgggcgtttcacggttaaacagccacagcgttattgtttgctgcgtattacgccgcctgcgcatcctcaaccacttgcagctgcatggatgcaacgcgcggaggaaaccgggcttttcgggccactggcgttggcggcaagcgatccgctgcctgctgagttacgccagtttcgtcactgttttcaggccgcgctcaatggcgttaagaccgactggcggcactggctgggtaaaggccccggattaacgccgagtcatgatgacacgctgagcggaatgctgctggcggcctggtattatggcgctttagatgcgcgctccggtcgtccgttttttgcctgttccgacaatctgcaactcgttaccacagcggtgagcgtcagttatttacgttatgccgcgcaaggatatttcgccagcccactcctgcactttgttcatgctctgagttgcccgaaacgtaccgctgttgcgattgatagcctgctggcgctggggcatacgagtggggcagatacgctgctggggttctggcttggccaacaattattacaaggaaaaccatgaaaacactggttgtggctcttgggggcaacgccttactccagcgcggtgaggcgctgacggcagaaaatcaatatcgcaatatcgccagtgctgtacccgcgctggcacgcctggcccgttcttatcggttggcgattgttcacggcaacgggccgcaggtggggctgctggcattgcagaatctggcgtggaaagaggtagaaccgtatccgctggatgtgctggttgcggaaagccaggggatgattggctatatgctggcgcagagtttgagcgcacagccgcagatgccgcccgtgacgacggtgctgacgcgcattgaggttagccctgatgatccggcgtttttgcagccagagaaatttattggtccggtttatcagccagaagaacaagaggcactggaagcggcttacggctggcagatgaaacgtgatggtaaatatttgcgccgggtggtggcgtctccgcaaccgcgtaaaattctcgacagcgaagccatcgagttgttgctcaaagaggggcatgtggtgatttgcagtggcggcggcggtgtgcctgtgacggatgacggagcagggagtgaagcagtgattgataaagatctcgccgctgcgttgctcgccgagcagattaatgcagatggactggtgatcctcaccgatgctgatgcggtatatgaaaactggggaacgccgcagcaacgtgccattcgccatgccacaccggatgagttagcgccatttgccaaagccgatggtagcatggggccgaatgtaacggcggtgagtggttatgtcagaagccgtggtaaacccgcgtggattggggcgttaagccgaattgaagagacgctggcgggcgaagcggggacctgtattagcctgtaatcgtaggcattagacatttgtgcctgatgcgacgcttgacgcgtcttatcaggcctacaaccggtgccgcatccggcaattggtgcacaatgcctgatgcgatgcttgacgcatcttatcaggcctacaatgggtaccggatcggtaggccggataaggcgtttacgccgcatccggcaagaatagagcaccagttaaccgaacttactctgcgcccaaatcacgccgctggcatattccggcggcagcagcgggattaaggcttccagcgtcgcagtcagacggcttgtgtcgctgtcggtcaaattcagatgccccactttacgccccggacggacttctttgtcgtaccagtgcagatgcaccagcggcagtttcagccagtcataattcacatcgctaccaatcagattgatcatcacgctcggattattcaccactggttgcggtaacggcagatcggtaatcgcccgcagatgcagctcaaactggctgatgctggcaccgttttgtgtccagtgaccgctgttatgcacacgcggtgccagttcgttgatcaacagaccttgcggggtgacaaaacactccatcgccatcacgcccacatagcccagctcctgcataatcgcgctcagcatctcttcggcttgcgcctgctgctgtgcgttggcctgcggaaaagcgacgctggtgcgcaaaataccgtcctgatgcaggttatgcgtcagcggataaaacacggtgctgccatcaaagccgcgcgcgccaaccaggctcacttcaccagagaagttaatgccctgctcgacaatacattcgccgtaacactctgccggtaactgttcggtttcatttgcgcgtaaacgccattgaccgcgaccgtcataaccaccagtgcgacgcttaacaatcgccagctcacctaaacgatcaaacaccgcaggccactcgctgcgttcggcaagtaactgccacggtgcagtcggcaggtggagcttatcgaaaagctgcttctgagtcagacggtcagcaataatcgggaacacatcgcggttcacaaaggccggatggcgcgccagctcgcgggttaatgcggtttccggccagcgttctatctcagcggtaatcacgctttgttgaaaaggcaccgccgccggttcagcgtccagcccgactggccagacagcaatgcctaacggttcgcctgcctgacgcagcatacggcctaactgcccgttaccgaggacgcaaacctgtttcatgccgcacctcgcgggtccgggttttccagcacttcgtcggtctgggctttgcgccagtcattcagacgctggtgcagttctttatcatgagtcgcaagaatttgtgctgccagtaacgccgcgtttgccgcgccagctttaccaatcgccagcgtacccaccggaatgccgcgcggcatttgtacgatggagtagaggctatcgacaccgctcagtgcggcgctctgtactggcacgcccagcaccggcaccagcgttttggcggcaatcatgcctggcagatgcgctgcgccgcctgcgcccgcaataatcacctgataaccgttctcttcggcgctttcggcgaagctgaacagtttatcgggggtgcggtgagcagaaaccacttcaacgtggtgcgggacattcaggatttcgaagatttcggcggcgaactgcatggtagcccagtcgcttttggaccccatcacgatggcgacacgcgccggattattgcgggaagacatgcgtcttaaaactcctgtggtgcacaactctcggctttagagggcacagagaatagcacggaaagagagcaaggaaaacggttgcgtggctgtgaaatcagcaaagttgcgggttttttaaaacggaaaatgaatcagctcaacgtcatccgccgtgactttcaccatactaccttccgtatgccaggcacccagtaccacgcgaaaagcaggttgctgattggcgataagttcatgcaccgccgggcgatgggtatgcccgtggatcagccattgcacctgatgtttttccatcgcactgaccaccgcgttttggttaacgtccatgatcgccaggcttttactgctgttggcttctttgctgttcgcgcgcattcgcgcggcaatgcgtttgcgcacaaacaacggcagggcgaggaatagcgtctgcagccagggtttgtggaccttggcgcgaaaagcctgataacccgcgtcatcggtgcacagcgtgtcgccatgcataatcaacacccggcgaccataaagttcgagcaccttttcttccggcaataacgtcatgccactttcacgggcaaagcgtttgccgagcagaaaatcacggttgccatgaatgaaataacagggaacgccggaatcggacaccgctttgatcgccgccgccatcttgcgatggagtgggttgggatcgtcgtcgccaatccatgcttcaaacagatcgccaagaatatacagcgcgtcggccttgcgggcttcccccgctaaaaaacgcagaaaaccggcggtgatcgccggttcttccacgcagagatgaagatctgcaataaagagtgtcgccacgattactcgctaacggtcacgctttcaatgataacgtcttcttttggcacgtcctggtgcataccgctacgaccggttgcaacacctttgattttgtctaccacgtccatgccgtcaaccacttcagcaaacacgcagtagccccaaccttgcaggctttcgccagagaagttcaggaagtcgttatcaaccacgttgatgaagaactgtgcagttgcagagtgcggagcctgagtacgtgccattgccagcgtaccacgggtatttttcaggccgttgttggcttcgtttttgatcggttctttggtggctttttgtttcatgcccggttcaaaaccgccgccctgaatcataaagccgttgataacacggtggaaaatggtgttgttgtaaaaaccttcgcggcagtagtccaggaagtttttaactgtttcaggtgctttatcgtcaaaagttttgatgacaatatcgccgtgattggtgtggaaagtaaccatttttgcatcctgttccgtttgattggtgcttcaacccagttcgggtcatatatagggtggtgttatagcataaccgcacgatcggatcatcacgcaatgtatgctgattcgcgcgggaaatatgggtattatacgcaactcaattacccacacatgtctaaacggaatcttcgatgctaaaaatcttcaatactctgacacgccaaaaagaggaatttaagcctattcacgccggggaagtcggcatgtacgtgtgtggaatcaccgtttacgatctctgtcatatcggtcacgggcgtacctttgttgcttttgacgtggttgcgcgctatctgcgtttcctcggctataaactgaagtatgtgcgcaacattaccgatatcgacgacaaaatcatcaaacgcgccaatgaaaatggcgaaagctttgtggcgatggtggatcgcatgatcgccgaaatgcacaaagattttgatgctttgaacattctgcgcccggatatggagccgcgcgcgacgcaccatatcgcagaaattattgaactcactgaacaactgatcgccaaaggtcacgcttatgtggcggacaacggcgacgtgatgttcgacgtcccgaccgatccaacttatggcgtgctgagccgtcaggatctcgaccagctgcaggcaggcgcgcgcgttgacgtggtcgacgacaaacgcaacccaatggacttcgttctgtggaagatgagcaaagagggcgaaccgagctggccgtctccgtggggcgcgggtcgtcctggctggcacattgaatgtagcgcaatgaactgcaagcagctgggtaaccactttgatatccacggcggcggtagtgacctgatgttcccgcaccacgaaaacgaaatcgcgcagtccacctgtgcccatgatggtcagtatgtgaactactggatgcacagcgggatggtgatggttgaccgcgagaagatgtccaaaagcctgggtaacttctttaccgtgcgcgatgtgctgaaatactacgacgcggaaaccgtgcgttacttcctgatgagcggccactatcgcagccagttgaactacagcgaagagaacctgaagcaggcgcgtgcggcgctggagcgtctctacactgcgctgcgcggcacagataaaaccgttgcgcctgccggtggcgaagcgtttgaagcgcgctttattgaagcgatggacgacgatttcaacaccccggaagcctattccgtactgtttgatatggcgcgtgaagtaaaccgtctgaaagcagaagatatggcagcggcgaatgcaatggcatctcacctgcgtaaactttccgctgtattgggcctgctggagcaagaaccggaagcgttcctgcaaagcggcgcgcaggcagacgacagcgaagtggctgagattgaagcgttaattcaacagcgtctggatgcccgtaaagcgaaagactgggcggcggcggatgcggcgcgtgatcgtcttaacgagatggggatcgtgctggaagatggcccgcaagggaccacctggcgtcgtaagtaattgcgctattgccggatgcgagttttcgcatccggttatcgtctgcgccaccacaacattcccatcagtagcatccccggcaaccacacccacatcaattcagaaataatcacctgatgcccgtacggcgtggtgtaacgagacaatgcaaacggcgcgacttttatcacctgccagggagcgaaaaagcgttcatcactccacggccacagccagccaacgcctttaccgccagtggttacgctatccagcaagctgtggcttagcaagctgacggttaaaaacagccagcagcgaatcagcccagccctgaaccatcggcgtccaataaacacacataacagcgggacaacaaacgcaaacaccaggctatgggtaaacccgcgatgaccaaaaacattgccgtaagcaacgccaaatttaaagctcaatacgtcggcgtcgggcagcatcgccaggatgattccggcaaataacagacgcggagggatgactttgctacccaaccctaaaccaatgcataggggaacggcggcgtgcgtaataacggttggcatgatggtcgcttcggcaaaatgtcgatgctatcagcatggatgaacggggcgtagagggcaaaagtctgaaaagagaaccggcctgttgatacaggccgggaaagggatcaggcaacaacctgtacgctgtgacctgcaaaactcactgtctgaccggcgacgattttgcagcgtttgcgcgtttcaaccgcaccgtcgactttcacctggccttcggcaatcgcgattttcgcctgcgcgccgctttcgctccagccttccagtttcagcaagtcgcacagctcaacgtgcggatgtttacctaaagaaaatgtcgccatgttactcatcctgtggatcatgatattcaacgcacgcctgtagcgtgttttcaatcagcgtggcaaccgtcatcgggccaacgccgccgggaacaggcgtaatgtaactggcgcgtttagccgcgtcttcaaacacgacgtcgcccacaactttgccattttccagacggttgatgccgacatcaatcacaattgcgccttctttgatccagtcaccgggaataaagcctggcttgccaacggcaacgatcaatagatcggcattttctacgtgatgacgcagatttttagtgaagcggtgagtcactgtagtggtgcaacctgccagcagcagttccatgctcatcgggcggccaacgatattgcttgcgccaatcaccacggcgttgaggccgaaggtatcaatgttgtaacgctcaagcagcgtgacgataccgcgcggggtgcagggacgcagacgcggcgcgcgctggcacagacgaccgacgttgtaaggatggaaaccgtccacgtctttgtccggatgaatacgttccagcactttgacgttatcaatacccgccggtaacggcagttgaaccagaatgccatcgatggtgttgtcggcattcagcgtatcgataagctccagcagctccgcttcgctggtggtttccgggaggtcataagagcgggagacgaacccgacttcttcacaagccttgcgtttgcttgcgacataaatttggcttgcagggttactacccaccagcacaacggccagtcctggtgcccgcagtccggctgcaatacgcgcctgaactttttgagcaacttcagagcgcacctgctgcgcaatcgttttaccgtcaataatctttgctgccatcagagagaggattccatctgttacgtagatcgaaggggatgcgcctattttgtcagaagcggggcgcgctgtcaggtttcgtttcagatttatcgcgtgaagcgacctcttgcgaaggtgaggcgcaccgtcgctgagactgaaagcttcatttttcgtccatgatggcgttgtaaatctggaactgatttatttccttgtctaaggattaagataatttaagaaatacctgacaatataaaaagaattttcagcctggtaatttaccgcttcaggtctatatttgtgttgaatatattttgcgcggaagtattcatctaacggggctctctattttttagaatagagtgcatattttcaattaagacattcttagaggataaaaaggaatttactactatcagtgtcttaaataaagtaatcggttatatacggatgtggagtcgataaatgagattgaaggaatatatatgaaattaagatttattagctctgcgctggctgccgcactattcgccgctacgggtagttatgctgccgttgtagatggcggtacaattcactttgaaggcgaactggtgaatgctgcctgtagtgtgaatactgacagcgcagaccaggttgtcacactcggtcaatatcgtaccgatattttcaatgctgttggtaatacctctgcattaattccattcaccattcagttgaacgactgcgatcctgttgttgccgctaatgctgccgttgcattttctggtcaggctgatgcaatcaatgataatttattggccattgcatccagtaccaatacaacaacagcaacgggtgtcggtattgaaatacttgataatacatccgcaattctcaaacctgatgggaatagcttcagtaccaaccagaacttgatccccgggaccaacgttcttcatttttctgcacgttataaaggcaccggtacaagtgcaagtgcagggcaagcaaatgctgacgcgacttttattatgagatatgaataatcaaaaccacgttgttttgaattatatatcacgtcttataacaaagtaatgtaccggttgtctgaagcggtatggtggcaatgtaaatcgaaatcatgttcactttgtatcatgccgctttattaaatgaaaagggaatgatgtgttgtaagaaaccaaagcaatcatttctttatattccttatttttgccgtcaggaatacacaaggcgtattaactatgatgactaaaataaagttattgatgctcattatattttatttaatcattagcgccagcgcccatgctgccggagggatcgcattaggtgccacgcgtattatttatcccgctgatgctaaacagactgcggtatggattagaaatagccataccaatgagcgctttctggtcaatagctggattgaaaacagcagcggtgtaaaagaaaagagtttcatcattacaccgccactgtttgttagtgaacccaaaagcgaaaatactttgcgtattatttacaccggtccaccgctggcagcagatcgtgagtctctgttctggatgaatgttaagacgatccctagcgtagataaaaatgcattgaacggcaggaatgttttgcaactggcgattttaagccgcatgaaattatttctccgtccaattcaattacaagaattacccgcagaagcgccggacacactcaagtttagccgatccggtaactatatcaatgttcataatccaagtcctttttatgtcaccctggttaacttacaagtgggcagccaaaagttggggaatgctatggctgcacccagagttaatagtcaaattcccttacccagtggagtgcagggaaagctgaaatttcagaccgttaatgattatggtagtgtaactccggtcagagaagtgaacttaaactaaccgaatcatctgacaatatcagagctaattatgaaaatacccactactacggatattccgcagaggtatacctggtgtctggccggaatttgttatagttctcttgccattttaccctcctttttaagctatgcggaaagttatttcaacccggcatttttattagagaatggcacatccgttgctgatttaagccgctttgagagaggtaatcatcaacctgcgggcgtgtatcgggtggatctctggcgtaatgatgagttcattggtagccaggatatcgtatttgaaagcacaacagaaaatacaggtgataaaagtggtgggttaatgccctgttttaaccaggtacttcttgaacgaattggccttaatagcagtgcatttcccgagttagcccagcagcaaaacaataaatgcatcaatttactgaaagctgtacctgatgccacaattaactttgattttgcagcgatgcgcctgaacatcactattcctcagatagcgttgttgagtagcgctcacggttacattccgcctgaagagtgggatgaaggtattcctgctttactcctgaattataatttcaccggtaacagaggtaatggtaacgatagctatttttttagtgagctcagcgggattaatattggcccgtggcgtttacgcaacaatggttcctggaactattttcgcggaaatggatatcatagtgaacagtggaataatattggcacctgggtacagcgcgccattattccgctgaaaagtgaactggtaatgggagacggcaatacaggaagtgatattttcgatggcgttggatttcgtggtgtacggctttattcttctgataatatgtatcctgatagccagcaagggtttgccccaacggtacgtgggattgcccgtacggcggcccagctaacgattcggcaaaatggttttattatctatcaaagctatgtttcccccggcgcttttgaaattacagatttgcacccgacatctagtaatggcgatctggacgtcaccatcgacgagcgcgatggcaatcagcagaattacacaattccgtatagtacagtgccaattttacaacgcgaagggcgtttcaaatttgacctgacggcgggcgattttcgtagcggtaatagtcagcaaagtagccctttcttttttcagggtacggcactcggcggtttaccacaggaatttactgcctacggcgggacgcaattatctgccaattacaccgcctttttattagggctggggcgcaatctcgggaactggggcgcagtgagcctggatgtaacgcatgcgcgcagtcagttagccgacgccagtcgtcatgagggggattctattcgcttcctctatgcgaaaagcatgaacaccttcggcaccaattttcagttaatgggttaccgctatagcacacaaggtttttatacccttgatgatgttgcgtatcgtcgaatggaggggtacgaatatgattacgacggtgagcatcgcgatgaaccgataatcgtgaattaccacaatttacgctttagccgtaaagaccgtttgcagttaaatgttagtcaaagtcttaatgactttggcagcctttatatttctggtacccatcaaaaatactggaatactagcgatagtgatacgtggtatcaggtggggtataccagcagctgggttggcatcagttatagcctcagttttagctggaatgaatctgtagggatccccgataacgaacgtattgtcggacttaatgttagtgtgcctttcaatgttttgaccaaacgtcgctacacccgggaaaatgcgctcgaccgcgcttatgcctcctttaacgccaaccgtaacagcaacgggcaaaatagctggctggcaggtgtaggtgggaccttactggaaggccacaacctgagttatcacgtaagccagggtgataccagcaataatgggtacacgggcagcgccacggcaaactggcaggccgcttacggtacgctggggggcgggtataactacgaccgcgatcaacatgacgttaactggcagctgtctggcggtgtggtcgggcatgaaaatggcataacgctgagccagcctttaggggataccaatgttttgattaaagcgcctggcgcaggcggtgtacgcattgaaaatcaaactggcattttaaccgactggcgcggctatgcggtgatgctgtatgccacggtttatcggtataaccgtatcgcgcttgataccaatacgatggggaattccatcgatgttgaaaaaaatattagcagcgttgtgccgacgcaaggcgcgttggttcgtgccaattttgatacccgcataggcgtgcgggcgctcattaccgttacccagggcggaaaaccggtgccgtttggaagtctggtacgggaaaacagtaccggaataaccagtatggtgggtgatgacgggcaagtttatttaagtggtgcgccattgtctggtgaattactggttcagtggggagacggcgcgaacagtcgctgcattgcgcactatgtattgccgaagcaaagcttacagcaagccgtcactgttattagcgcagtttgcacacatcctggcagttaaaggaaattatcaataagataatctgcagattattattggcgatggcatgtttgtgtctggcaaacatatcctgggctactgtttgtgcaaatagtactggcgtagcagaagatgaacactatgatctcagtaatatctttaatagcaccaataaccagccagggcagattgttgttttaccggaaaaatccggctgggtaggtgtcagtgcaatttgtccacccggtacgctggtgaattatacataccgtagttatgtcaccaactttattgttcaggaaactatcgataattataaatatatgcaattacatgattatctattaggtgcgatgagtctggttgatagtgtgatggatattcagttccccccgcaaaattatattcggatgggaacagatcctaacgttagccaaaaccttccattcggggtgatggattctcgtttaatatttcgtttaaaggttattcgtccctttattaacatggtggagatccccagacaggtgatgtttaccgtgtatgtgacaagtacgccttacgatccgttggttacacctgtttataccattagttttggtggccgggttgaagtaccgcaaaactgcgaattaaatgccgggcagattgttgaatttgattttggtgatatcggcgcaagcttatttagtgcggcagggccgggtaatcgacctgctggtgtcatgccgcaaaccaagagcattgcggtcaaatgtacgaatgttgctgcgcaggcttatttaacaatgcgtctggaagccagtgccgtttctggtcaggcgatggtgagcgacaatcaggatttaggttttattgtcgccgatcagaacgatacgccgatcacgcctaacgatctcaatagcgttattcctttccgtctggatgcagctgcggcagccaatgtcacacttcgcgcctggcctatcagtattaccggtcaaaaaccgaccgaagggccgtttagcgcgctggggtatttacgcgtcgattatcaatgaggtacggagaatgagaagagtactctttagctgtttctgcgggctactgtggagttccagtggatgggcagttgaccctttaggaacgattaatatcaatttgcacggtaacgttgttgatttctcctgtaccgtaaacacagcggatattgataagacggtagatttaggcagatggcctacgatacaactactgaacgctggcgataccacggcactcgtcccttttagcctgcggctggagggatgtcctccgggtagtgttgcgattttatttacgggaacgccggcatccgataccaacctgctggctctggatgatcccgcaatggcacaaaccgtcgccatcgaattacgtaatagcgatcgctcccggctcgcactgggggaggcgagcccgactgaggaagtagatgcaaatggcaatgtcacactaaacttttttgccaattatcgagcgttagccagcggtgttcggccaggtgtggcgaaagcggatgcgatatttatgatcaattataattaatattatattaattcgtataatttggcgtagtcgataagctctacaatactatgcaaacctagcttgccataaatattagatttatgcgcactaactgttttattgctaagtaataacttatcggcaatttctttattagataatccgctaaccagataacgtaatatggtcacttcacgattagatagcacagtgaccgtactactattcgtactacatttattgctttttatatagttaagcgtttcgctgggaaaaaacgtgtatccggagaggatcatctgaacggcatgaaaaatatcattctgatcattgcatttactgacaaaaccgttagcaccagcttgtatcgctctgccagcataaaagcattcacttttgctacttaaaaataacactttcactgtgctctggatttgtttgatccttttcaggaaggtaaaaccgtctgttccgggcaagtctatatccataatgattaaatcaacaggacgggttcggagataatcgatggttatgcgataatcatccgttttcaggacaatctgcaattcactgtttttttgcaacagaacttcaatagacattctgatgataggatgagtatccataatgatcacgctcgttggtttcatagttaccagtctcataggagcggacaattttccgttaggtcgggaaattgtactttgatacatgaaaatacgggttttcttgattcagacgcgcagcggtgtgcgtttgtttgccgctatagcgaaataaatcagaaaatcagacgcggtcgttcacttgttcagcaaccagatcaaaagccattgactcagcaagggttgaccgtataattcacgcgattacaccgcattgcggtatcaacgcgcccttagctcagttggatagagcaacgaccttctaagtcgtgggccgcaggttcgaatcctgcagggcgcgccattacaattcaatcagttacgccttctttatatcctccataatttcagagtgggacatatttgggacattatcaccaaaaatgtcgtctattttcctcgcatgctctgtcaaatgattaggcgcaaggtgagcatacctacgaaccatttctatggactcccatccgcccatttcctgaagcactgataatgggacgcctgactgaatcagccagcttgcccaggtgtgtctgaggtcatggaaacggaaatcttcctcatttatgcccgtcttatccgtttccgctttgcccttcaccacatcactttttgtcgctgtttggcgagataattcaacggtgtcaggccgtaaaacgccttaaaaacagagataaagtagctcgtgctgctatagccacataattgcgccacctgagtgatatttttgttatccatcaataacatctgtacggcgtaacgcatacgacactctgtgacaatctggctatagctggtattttcgttttttaatttctttttgagcaggctggggcttaaacataggctactggcgacaattcgcagattccagtaatgctgaatatcgctttgaataatgcggcagacgctgtcgcggacgctgctgcgtaagatatacatcagtagggcaataaaccggctttgctcaagaaagttagacaatacggtaaaaagcaatgcgcgcgtcaactccgcttcgcagggtctgctgggttgctgcttgctgtggttggcggctagccggaacacttccggtgtacggctatgacaagcgataaccggggttgccagccggctccagggctttacacaggttaagttcttatttaaaaacaacagataatcgttgatgatgttacggttgatgtgggtgattaatacgtgatttaacgtactgagttcaatgacgttattgttgcacgcgaaggcggccaggtagtttttcggaagggtaaacgtagcatggttattgacgcttacctctacctctttttcggtcaggatcaccacgcaaggttcactgctgctcaattgcatttcgcactcctcagatatcagaaactccgctcaaaggatctatgcttcctgcatgagtgatcggcccgttcgccgataacgatcttctttctttagcacgctttttagcaattaatcttgatggaattctgatgagagcgaaagaggtaagccaggtcgtacccgacttacctggaggagatttaatactcgagaatgccgtgcgcgacgggcaaatagcgcagagagaaatagagagtgtctttaccgcaagaggaacgtttcgctaacaggctggcaatttctgcgtccggtttcggtttcgctgtaaaggttttgcctttgccggcgacaaaaagttcataaacaacgccgctggcaggggcgggactttggcaatcggcgctggcctgtaaataacgttcacgctgttcagcggtcagtttatccacgccgctgccatcctgtacccagacattaacgccggttgctttaacgtgttccagcagttggcgatagccatcggggctcatgtttccggcgaaaaaactactgatataaaccggttttgcactaacatcgctaatcagccgctgcgcgttgtttaaccatgttagcaaaggctgacgggcggcttcgctgcgccagttcaggtcgtcaatttccgcgctgatgtaccagccatccggcgttatgccaggcgcggcgctccataatctggcttgctggagatcggcagccagcaggcgattaagatagctttccagcgctgcggagctctgtttctggtgcataaaaaattccggatcggcgttcagcccgacaataagcttcagaccagcctgttgcgcagctgcggcccgcttaaacaataacgtgcgctgttctggctgggtaaatgcatcgccgtaacgggtccattgcaaaacaagggtatcgaagccttgcaaacgtaactgactcatcagcccctgccactgggtatcggtaacctgactatctcggttttgtggttgccagataatacctttcatcgcaaaggaaaaagggctgaccaaaagcagtgtcagcaatacgaaaatgaacttacgcatttaccagtgcactccaatggtgagaaacgcgttgttgcgctctccgttacgttgattaatcgccttaaaggtatgttgatactcgacgccgagactgactttgtgcggccaggcgtcgtagtgcgtctcgccggtccagatattccagcggaccccgactccgccaagctgcgcgccctgagtgcctttatcacgatagccgttgtcctgaacgtgagcgtaaggctcaatagtctgtccgttagctaccttctgatgccagctgacgcgataatctgccgtccacgcctgaatatcctggcggatatattgcgccgcatcgaggtacaggttttgggcaaaccagccactaccgttcgggtgccattcgtcgctgtatttgccgccattaaagaaactggcgctggcgcgcagcatggtatcggatgcgccattttggccgttcagcggcaactgctgttcgacggcgatgaaaaagatctgatcgcgcagcggcttccagcgcagaccggtgccggacatcggatttttcaccggcatcatcaccccgttttctccggtatcggcaaagacgcggctataaacactgagcaggtcgccttccagcagcatattgcgtccgatgcggtactcggcttccagttgtccgtagctacgatagcttttccctggcgctgcgccgccgacattattgttagcggtactcattgcgccggaacgcaagccgatggaagaatcgaaactgaacgtccagcggcgaccgacctcctcatgcaaacggcggaaattgaagcgttgttgattttgttctggggtcagtggggttatcagcgcctgattatcaatgtcatcaatcaccagccgggcgtagtgctgcgtcgcaggcatgtcatccagacgctggttcacgtaggccagttgtcggatcagtgccggatcgtccggaagccctttatgcgccggttcgagcatttcccggctctgtgcgatatcaccgctatcccacaaggcgtaaccaagcgctgcctgggtgttgctattattcggttccagttccagcgcggcgcgcaaatcactcaccgcggccgggacattatgacgttggcgataaattgtcgcccgcgcaacgtaagcgttggcagaaggcgcaatattgatactgcgcgtgagatcgttcagtgcgagttccggctgaccaggaatgtaacgttgcgcatgcagccaccagtagagggcattgcttcccagtccacgtttttctgcctgttgtagccagcgatcgcgagccgcaccatttcctgccgcctgggcggtattggcagcagcaagcagatcctcattgctcatgtcgtgaagactgattttctgccaggccgccagtgcggtggcgtagtcctcaacctgatacgcctgataggctaccgcacgatgttgccaggcgctcggttgtcgttgttcggcctgaagccatgcatacaacgccacaccgggtagcgtgtcccgataacactttgccagacggttccaggcggcggcatcgtaggaagggctcatatcgcccagcaagcgaactattgccgggcaattatctgcaatacccggcaactgactttgccactgacgttgctccgccagcggtaagggtttgcttaaaatcgccaccttcgccggcgttgccaggtaaggatgactttccagcagagacgccagtcgcgccattaaagtctggctgacacgcgcatcgccctggaaaggatagcgttgcagcaataaatcggcagcttcgcgactctgctcgttctgcatcagttgccaggttagttgatccaggcgggtaagatttgccggttcttgctgatacagcaatcgtgccagacgcagagcttcagccttgttacgggtcgccacgctgacagcataacgctcctcaagcatttcattggcggggagggtggcgagcagtttttgcgctgcgtcgtactgaccttcttttaacagcaccggtagcgtcgcgccaacaacatactggcggttgtcggcaaactgtaccgtataattcgccaacgcctgaacggggttagcgctgtatttagataacagatagagccaacttttctcttgtgcgtccgtggtaaatagtggcttattttcaatgagataatgctggaggcgtgctttttcgccacgataagccagcgcggtcgcgtaagtaatataactctgaggatcggtgaagatcccctgactttgcagtgccaggatccgatcgtccagctgcccggcaagaagcacgtcaaaccactgacggcgttctgccgcgcttaatgtgttctgctggcgtgcttcattgtatagcgtatctgcctgggaccattgtttcaggtagattgcccgttgcagcagatcggttcgcagcgtttttccttccgggcttgcagcaaacgtcgcatcgttcagttgcgctctggcgacaggtaactgtgccagccgcagggcattctgcccgacttcactgcgacaacgcagggtcggcgcagcatcgcacgctttttgctgggcaagcagttcttcaactgtcgtaacgcttttcacttcaaccggaatagccgccagactgcgctcaagtcgggcatctcctgggtgacgtttcagttgatcctcaagcaacagccgcgcccggtcatcatgaccaaaatggcgataggcttccgcaaggtataaagtcagcggaatattatccggcacctgctggtgtatatattcaaattcgcggatggcggttgcttcgtcgttatttttctgtgccttcagcgctttatcgagacggggataaataacaaaatggcgataatcgctcagccccagctcttctgcgctggtgccgatattgtctgcgagtgcgctggtactcaataaagacgtcagcagtaaaccagaccatccgatgacgcgattaaggttattctccttcattttcggactccagttgcgcaacctgttctgtgtttaaacctgctttgagtaatagactttgcatgctaacttgtaattcgcgttgaattgtcaggacgcgatccaacgtttcctggctgataacgccttcggtgaccaaaaacttgccgagcggcagagaactgcgttcatggcgcaataacaacacgttaattgcactacgattaatatgaccgagcgtggtcagtatttcggcgaacaggaactgatgcggcacatattgccgccagatttcaccggcctgctgttccgtgagccactgatgctgaaccgcattgtacaacattgcccgcggatcgtgaccgcgtcggcgtgcataccagtgacgtaaccctgtgacaatttgtccccgcagaacaatgacgtaacgcactttgcgtccgactttacgcgtcagggccgccaggctaaccgggtcaataccatcttcactgccgacaattaactcgtcattttccagacgcagcggcagtaccgcataatgcagcgccacggaggccggcatttcggcaatcaggctggaagggatctgccaggcatcgatggattcccacgccacgccgttttgctctgccagcgcctgtgccagctgctcggcgctaatcagcccctgcatcagcatactaccgcccaggcgtagaccttcgacgcgattacgcagtgctgtatcgagttgttcttcagtgatgacctgattttccagcagaatttgacctaacgggcgcaagctgcgggtatcgccagtcacgctggggaagtcatgcgttgttttatcccacgccacgcgacgtggatcgccgtgttgaagtacctgttttagcgcgcgccagttggccatgaagttaatcaggttgccccagaaaagacgcaggacggaaagcagcccctgcgtcaggccgtagtagccagtaacgaaaatcacccgctgcacgatgcggttaaccatcaaaccaaagtttagccacagcagggtcattaaccatgcgctgccgctgaaaatagaaaggaaatgccaggcatcgggccacaaactttcatacgccagcaacagcaaaagctggatcatcaccagcatcgcgaggaagctgacaaagttactgattgcccctttgcggtcgcgccagagaaagtagttcagcgtcaggctggaggtccatttatgggttttaaagccttggaaaacaatgccgatgatccagcgggatttttgtcgaaccgcagtgctaaaggtatcggggaaatattcgcgcacgcagatcatgttacttgtccgcgcgtgctgtaaaaatttacgctgctcgcgttctttggcttcgtccaccaccggaaaacggacaaaaatttccgtcatacctttttctttcaggcggaagccaatgtcgtaatcttcagtaagactctgcacgtcgaaagcaataccgtcaccgtcagctaacagtgcggtcacggcgcggcggctgaaacaggtgccgacgcctgcgctgggcacttgtccggcgagggcttcacgcaccggaacatctttgccatgcagctcactaaactcatcaatgtaagtcatgctggtgaagtgcgtccattcgcgttcgaacggatacaccgggatctgaatcagatctttacgctcgaccagatagttgaacagacgcaattccatcggactaatcacatcttcggcgtcatgcagaataaaaccagcaaaagcgaaattggcgctacgctcaaattgggtgatggcgtccagcacgttgttcagacagtcggctttgctggtggggccaggacgcgcgcagactaccttatgcacattcgggaagcgagcgcacacttcgtcaacatcacgctgagtatcggggtcgttggggtaggtgccaacaaagatatgatagttttcgtagtcgagcgtggtcgccgccagctcggccatattgccgatgacgcccgtttcattccacgccggaaccataatcgctaacggtttttcatctggtttatacagttcgcggtaactcattcgcgggtagcggcgataaacactcaacttgcgtttaatgcggcgtacccagtagacgacatcaataaaaaaatcgtccagcccgctgatgaacatgatgaccgctaacgttatcgcgattacttttaagccgtagagccaggtagcaaaaacatcaagaagccagtccacacaaaaaccttacattaacgctggttatgtttagggtggcgtatattaaggttttttatgaattgtgacagctttttaccattaataggtatgactattgcggcacgttatttttacactggttataaaagttgccgtttgctgaaggattaagcgggtaatgtgataacaaaccttgtcccccgcgcatcgctcgttaccgcaaccgtgcctttatgcgcgacaacaatgcttttcactatcgccaggccaataccgctaccttcaccttttcgctggcgggaggggtcaacgcgatagaaacggtcaaacaatcgcggtaagtgctcgggcgcaatgggcgtaccggggttttcgacgataacttgcaccaggtgatcgaccgtctgacagcgcactacaattgtctctccggttggcgtataacgcagggcgttgctaagcaggttgcttagcgcccgacgcagcatcagcggatcgcccgcgacctgacacttgtcgccaacaaaccgcaactccacgccgcgatcttccgctaacgcctcgaaaaaatcgaacactttgccgacttcatccgccaggttgagcattttcttttcggggattagctggttgttatcggcctgagcgagaaacagcatatcgctgaccattttcgccattcgcgtcagctcttcgagattagagtagagcacatcttccagctccttctggctgcggctctggctgagggcgatttcggtttgcgttatgagattcgtaattggtgtgcgaatttcgtgagcgatatccgcactgaaattggactggcgggtaaagacatcctcaatacgctcgatcatatggttgaagctcagtaccagctgttccagctcaatgggcacggtctgcgggtcgaggcgaacgtcgagatctttgctggtaatattctggatttgacggctgacgctgcggatcggcgcgtgacctttatgtaccgccaacagtacgataaagacgatcaggatgctgattacgcttgcggtcataataagtttattcatcaaatcatttatgtaatgaagatgaaaatcgatgctaagcgcgatgtagagcgtataaatcggtttgccgtccaccaacgggccaaccggcaagttaatcatccgccagttgctgtgttccatatgcccgtgaccgtggcctggcatcatcatcgtcgggccggaaaggagatacacctcgccaccctgagcgtctttatcgggtatggcgtcacgcgtaaactcgcggatatccggcgcaccgggggagtgatacaccgttttaccctgactatctgccagggaaatcaacacattggaataaccactgacgatatcttccagcgtcattaagcgtcgggcttgcgtttcgtcagggtgatttagtacccgttcaagggtggcgctaatctcttttaaatcattaatatcctgctcggcaaaatgaacttttacactgtggatcatgatccatgcaaaggcgaaaaacgccgcgatggtggccaggctgataaaaaaggtcaggcgggttgccaggctaaacgggcgctgaaatggcttactgaccatccggcacctcaagcatgtaacccacgccgcgcacggtctgaattagcttcggctcaaagtcgttgtcgattttgccgcgcagccgcttcaccgccacatcaatagcattggtatcgctgtcaaaattcatgtcccatacctggctggcgataaggctgcggggcagcacttcgccctgatggcgaaggaagaactccagcagagtaaactctttactggtcaaagtgatgcgcgtgccgctgcgggtgactttgcggctgacgagatcgaccatcaaatcggcaacctgaaactgactttcgataatcaccgccgccccgcgccgcagtaatgtgcgcacccgcgccagcagttcagcaaaagcgaatggcttcaccaggtagtcatctgcccccaactccagccccttgacgcgatgttcaatggtgccaagcgcggtaagcaacagaatcggcatccctttattggcggagcgtaacatgcgcacgatatcccagccgttcacgtccggcagcataatatcgaggattatcagatcataatcaccggtcatcgccagatggtagccattcagcccgttgtcggccaaatcgaccacaaaaccggcttcggttaaccctttggtcaagtattctccggttttcttttcatcttcgacaatcaacagtttcatatttcctccgcatgttgcccgggcaattctagagtagcgggatcagatggcaatcgcttattggcaaaatgacaattttgtcatttttctgtcaccggaaaatcagagcctggcgagtaaagttggcggcataaaatcaccagaaattatgagcctatgtctccttgtaaacttctgccattttgtgtggcccttgcgctaaccggttgtagtctggcaccggattatcagcgtccggcaatgcccgtgccgcagcagttcagtctcagccagaacggcctggttaacgcagcagataactatcagaacgcgggctggcgcaccttttttgttgataatcaggtgaagacgctgattagcgaggcgctggtgaataatcgggatttgcgcatggcgacgctgaaagtgcaggaggcacgggcgcaatatcgtctgaccgatgccgaccgctacccacagctcaatggcgagggcagcggcagctggagcggtaatcttaaagggaataccgccacgacacgggagtttagcaccggccttaacgccagctttgacctcgattttttcggtcgcttaaagaacatgagcgaagccgagcgacaaaattatttagccactgaggaagctcagcgcgcggtgcatattctgctggtttctaatgtcgcgcaaagctatttcaatcagcaactggcgtatgcgcaattgcaaatagccgaagaaacgctgcgtaattatcagcagagttatgcgtttgtcgaaaaacaactgttgacaggtagcagtaatgttctggcgctggaacaggctcgcggggtgatagaaagtacccgcagcgacatcgctaaacgtcagggggaactggcgcaggcgaataatgcattgcaactgttgctgggaagctacggcaagctgccgcaagcgcagacagtaaacagcgacagcctgcaaagcgttaaattaccggcgggattgagcagccaaatcttattgcagcgcccggatattatggaagctgaacacgcgttaatggcggctaatgccaatattggcgctgcacgcgcggcattttttccgtctataagcctgaccagcggaataagcaccgccagtagcgatctaagcagtttatttaacgccagcagcgggatgtggaattttatacccaaaattgagatccccatttttaatgccggacgcaaccaggccaatctggatatcgccgaaattcgccagcagcagagcgtggtgaattatgaacagaaaatccagaacgcctttaaagaagtggcagatgcgctggcattacgtcaaagcctgaacgatcaaattagcgcccagcagcgttatctggcaagcctgcaaattactttgcaacgggcgcgggcattatatcagcacggcgcagtaagttatctggaagtgctggatgccgagcgttctttatttgcaacccgacaaactttacttgatctgaattatgcccgtcaggttaacgaaatttctttgtataccgcacttggtggcggttgacagcaatatactcgtcatacttcaagttgcatgtgctgcgtctgcgttcgctcaccccagtcacttacttatgtaagctcctggggattcactcgcttgtcgccttcctgcaactcgaattatttagagtatgacttttaactccaggagagaataaatgaaaaaagcactgcaagtcgcaatgttcagtctgtttaccgttattggctttaatgcccaggctaacgaacatcatcatgaaaccatgagcgaagcacaaccacaggttattagcgccactggcgtggtaaagggtatcgatctggaaagcaaaaaaatcaccatccatcacgatccgattgctgccgtgaactggccggagatgaccatgcgctttaccatcaccccgcagacgaaaatgagtgaaattaaaaccggcgacaaagtggcgtttaattttgtccagcagggcaacctttctttattacaggatattaaagtcagccagtaacccaggtttaatgagatgaaaaaaatcgcgcttattatcggcagcatgatcgcgggcggtattatttctgcggcaggttttacctgggttgcaaaggcggaaccgcctgcagaaaaaacgagcaccgcagaacgtaaaatcttattctggtacgacccaatgtatcccaatacgcggttcgataaaccaggtaaaagcccgtttatggatatggatctggtgccgaaatatgccgatgaagagagttctgcgtctggtgtgcgcattgacccgactcagacgcagaatctgggggtgaaaacggctaccgtcacgcgcggaccgctgacttttgcccagagtttcccggcgaatgtcagttacaacgagtatcagtatgccattgtgcaggctcgcgctgccgggtttatcgacaaggtgtatccgcttaccgtgggcgataaagtacaaaagggcacaccgcttctcgacctgaccattcctgactgggtggaagcgcagagtgagtatttactgctgcgcgaaaccggcggtacggcgacccagactgaaggcattcttgagcggctgcgactggcgggaatgccggaggcggatattcgccgcctgatcgccacgcaaaaaatccagactcgctttacgctcaaagcgcccattgatggcgtgatcaccgcgtttgatctgcgcgcgggaatgaatatcgccaaagataacgtggtagcgaaaattcagggtatggacccggtgtgggtcactgctgcgatcccggagtctatcgcctggctggtgaaagatgccagccagtttaccctcaccgttccggcgcgaccggataaaacactcaccatccgcaaatggacgctgctacctggcgtggatgccgcgacccgcacgctgcagctgcgtctggaagtcgacaacgccgacgaggcgctaaaaccgggcatgaacgcctggttgcaactcaacaccgccagcgaaccgatgctgctcattccgagtcaagcgctgattgataccggcagcgaacagcgggtgattaccgttgatgccgacgggcgctttgtaccgaaacgcgttgctgttttccaggcaagccaaggcgtcaccgcattacgctctggtctggcggaaggtgaaaaggtggtttccagcggcctgttcctgattgattccgaagccaatatttctggcgcactggagcggatgcgctctgaaagtgcgacccatgcgcattgagggaataaccaatgattgaatggattattcgtcgcagcgtggcgaaccgttttttggtgctgatgggcgcgttgtttctgagcatctggggcacctggaccatcattaatacgccagtggatgcgctgccggatctctccgatgtgcaggttattattaaaaccagctatcccggtcaggcaccacaaatcgttgaaaatcaggtgacttatccgctaaccaccaccatgttgagcgtgcctggcgcgaagactgtgcgcggtttcagtcagtttggcgactcttatgtgtatgtcattttcgaagatggcaccgatccgtactgggcgcgtagccgggtgctggagtacctcaaccaggtacagggtaagctgcctgcgggagtcagcgccgagctggggccagatgccacgggtgttggctggatctatgaatatgcactggtggatcgcagcggtaagcacgatctggccgatttacgcagtttacaggactggtttctcaaatatgagctgaaaaccatccctgacgttgcggaagtggcgagcgtgggcggtgtggtgaaagagtatcaggtggttatcgatccccagcgcctggcgcagtatggcatcagtctcgccgaagtaaaaagcgcgctggatgctagtaaccaggaagcgggcggtagcagcatcgaactggcggaagcggaatatatggtgcgcgccagcggctatctgcaaacgctcgacgactttaatcacatcgctttaaaagccagtgaaaatggcgtgcccgtttatctgcgcgatgttgcgaaggtccagattggcccggagatgcgccggggcattgccgaactaaacggcgaaggcgaagtggcgggcggggtggtgatcctgcgatccggcaaaaacgcccgagaagtgatcgccgccgtgaaggacaaactggaaacgctgaaaagtagtctgccggaaggcgtggagatagttacaacatacgatcgcagccagctcattgaccgcgccatcgacaacctcagcggcaagttgctggaagagtttattgtggtggcggtagtctgtgcgctgtttctctggcatgtgcgcagcgcgctggtggcgattattagcttgccgctggggttgtgtattgcttttattgtcatgcacttccagggactgaatgccaatattatgagcttgggtggcattgcgattgccgtcggggcgatggtcgatgctgctatcgtcatgatcgagaatgcgcataaacggctggaagagtggcagcaccagcatcctgacgccacgctggataataaaacgcgctggcaggtgatcaccgatgcgtctgttgaagtggggccggcgctatttatcagtctgctgattatcacgttgagctttatcccgatcttcaccctggaagggcaggaagggcgtctgtttggcccgttggcgttcaccaaaacgtatgcgatggcgggtgcggcgctgctggcgatcgtagtgatcccgatcctgatgggctactggatccgtggcaaaattccgccggaaagcagtaacccgctcaatcgctttttgattcgtgtttatcatccgctgttgctgaaagtactgcactggccgaaaaccacgctgctggtggcggcgcttagcgtgctgacggttctctggccgctcaataaagttggcggggaatttttaccgcagatcaatgaaggcgacttgttgtatatgccaagcacgctgccggggatttccgcagcagaggcggcgagtatgctgcaaaaaaccgacaagctaattatgagcgtacctgaagtggcgcgggtatttggcaaaaccgggaaagcggaaaccgccaccgattctgctccgctggagatggtagaaacgaccatccagcttaagccgcaggagcagtggcggccaggcatgacgatggacaaaatcattgaggaactggataacaccgtgcggctgccggggctggcgaatctgtgggtgccgccaattcgtaaccgtatcgatatgctcagtaccggcattaaaagccccatcggcattaaagtttccggcactgtgctggcggatatcgacgcgatggctgagcaaattgaagaagtagcgcgaacggtgccaggcgtagcttctgcgcttgccgagcggctggaaggtgggcgctatatcaacgttgagattaaccgtgaaaaagccgcacgttacggtatgacggtggcggatgtgcagttgtttgtgacttctgcggtgggcggggcgatggttggcgaaacggtggaagggattgcccgttatccaattaatctgcgttatccgcaaagctggcgcgatagtccgcaggcactgcgccagctgccgatcctgacgccgatgaagcagcaaatcaccctggcagacgtggccgacattaaagtctctaccggaccgagcatgctgaaaaccgagaatgcgcgcccgacgagctggatttatatcgatgcccgcgatcgtgacatggtgagcgtggttcacgatttgcaaaaagcgatagctgaaaaagtgcagttaaaaccgggcaccagcgtggcattctccgggcagttcgagctactggagcgcgccaaccataagcttaaactcatggtgccgatgacgttgatgattatcttcgtgctgttgtatctggcgttccgtcgggtgggcgaagcgttgctgattatcagcagcgtaccgtttgcgctggtgggcggcatctggttgctgtggtggatgggctttcatctttccgtggcgacgggcactggctttatcgccctcgccggggtcgccgccgaatttggcgtggtgatgctgatgtatttacgtcacgccatagaggccgtgccgagcttgaataatccacaaacattcagcgagcagaagctggatgaggcgttatatcacggcgcggtcctgcgcgtgcgcccgaaagcgatgacggtggcggtgattatcgccggtctgctgccgattctgtggggaacgggggctggtagtgaggtgatgagccggattgccgcgccgatgattggcggcatgatcaccgcacctttgctgagcctgtttattatcccggcggcgtataagctgatgtggctgcaccgacatcgggtacggaaataaaagcaggataccccgtttaaccgtgtggattgtgtcttgcgacgatgggcactaaatgttaaaaggtgcccctcaacaaaaaagacacacaggggaaaggcgtgaaaaacgcgagtaccgtaagcgaagatactgcgagcaatcaagagccgacgcttcatcgcggattacataaccgtcatattcaactgattgcgttgggtggcgcaattggtactggtctgtttcttggcattggcccggcgattcagatggcgggtccggctgtattgctgggctacggcgtcgccgggatcatcgctttcctgattatgcgccagcttggcgaaatggtggttgaggagccggtatccggtagttttgcccactttgcctataaatactggggaccgtttgcgggcttcctctctggctggaactactgggtaatgttcgtgctggtgggaatggcagagctgaccgctgcgggcatctatatgcagtactggttcccggatgttccaacgtggatttgggctgccgccttctttattatcatcaacgccgttaacctggtgaacgtgcgcttatatggcgaaaccgagttctggtttgcgttgattaaagtgctggcaatcatcggtatgatcggctttggcctgtggctgctgttttctggtcacggcggcgagaaagccagtatcgacaacctctggcgctacggtggtttcttcgccaccggctggaatgggctgattttgagcctggcggtaattatgttctccttcggcggtctggagctgattgggattactgccgctgaagcgcgcgatccggaaaaaagcattccaaaagcggtaaatcaggtggtgtatcgcatcctgctgttttacatcggtagtctggtggttttactggcgctctatccgtgggtggaagtgaaatccaacagtagcccgtttgtgatgattttccataatctcgacagcaacgtggtagcttctgcgctgaacttcgtcattctggtagcaagcctgagtgtgtataacagcggggtttactctaacagccgcatgctgtttggcctttctgtgcagggtaatgcgccgaagtttttgactcgcgtcagccgtcgcggtgtgccgattaacagcctgatgctttccggagcgatcactagcctggtggtgttaatcaactatctgctgccgcaaaaagcgtttggtctgctgatggcgctggtggtagcaacgctgctgttgaactggattatgatctgtctggcgcatctgcgttttcgtgcagcgatgcgacgtcaggggcgtgaaacacagtttaaggcgctgctctatccgttcggcaactatctctgcattgccttcctcggcatgattttgctgctgatgtgcacgatggatgatatgcgcttgagtgcgatcctgctgccggtgtggattgtattcctgtttatggcatttaaaacgctgcgtcggaaataaggcattcacgctacatccgacaaaacgatgtcaaccatccgaaaccgctctcatccattcgatgagagcggtttttttaattactgcttaaatgcacccgccagagagcgaatatcattgccggttggcgagtaatccccgcatatccggttgtcaggtcaggatggtaaggcacctgctttacactttcgcccgtggtcagtgatggctgcgggcgaatcgtaccagatgttgtcaattaatcgtgttggcacagcgttatgactatcttttcttttatctgccagtgcacagcaaacatctcattctcacgatgaatgatgacctgctgtttattccagctaattatctgatagtccagaaaacctgcatcagtttggatctcacttgccttaaatgcgctctctttggcggaaaatgccagtgtcagcgccagagaaaaggctaaaccgcagtctgcgagtcgctcgtgttccgctggtgtaataatgttgtctgtcaattctcttgcggtttgtacagaaaaaatttcttctatatcaatgccaatcggttgacgagataccacggctaatgccgtagtcccacagtggctaatactgccgtatacctccgcaggccagacaggttggcgtagctcgccgattgcgggcacacatttatagccatattcccgcaaagcataaacagcagcgatccgtccggctaaatgctctgttttacgtttacgtccagcgtgttgcagttgtgcgtagtgcggcagccagagtaaatcctgttcacaaaaattcgccggatcgaactcaacaaaatgcagcgtatgtccggcaaaggggagggaggtatgcgtagttttcatatcgaccatattcgagactgatgacaaacgcaaaactgcctgatgcgctacgcttatcaggcctacatggtcctgcaatatattgaattggcaagatttttgtaggccggataaggcgttcacgccgcatccggcatgaacgacgcgcactttgtcaacaatctgacgttagcatcagaagtgggtgtttacgctcatataccacgtacgtcccggctcgttataggtatacgccccggcaccggcgatatagttggcccctgccgaatcgcccgtggtctgggcattacccgcacgccacaaacgtttgtcgaacagattgtccacgccgccggtcagactgacattcttcgtcacatcccaggtcgcgctcaggccaacaatgctgtaaggactaatttctttggtttccggtccaaccgctggctgacctttatagttgtacttcttcggctgctgcttgccgtaccaggtgaaggtcgtttgcatgctcaaatcttcccgtgcctgccagctcagcgtactgttcaacgtatactccgggatgatgctcaaacggtcgcccgtggttttgttttcactcttcagcatataagtgatgttattggtccacatcaccgtttcgctaaccggtacgtttaagcttccttccagaccttcaaccaccgctttcggcacgttatcccactgatagagatcggtgccgactgcgttttgccctacagccacatagcccgcttcaatcttattgcgataatcgttacggaaccaggtgacgcccgccagccacccgtcgcgtttgaactccagaccaatctctttgttgatgctggtttctgctttcaggtcatcgttaccttgcagatagcagccgcccgcgctggcatagcaaccctgacctttactgtagagaatgtagttcgggttagtctggtacaggctcggcgctttataagcacgggcgatgcccattttcagcgtgaagtcatcgcctaaaccttggcttatgttcagcgccgggctccagttattgccgacaatactgtgatgatcgaaacgcagccccggcgttacgatggtgctgtcagtcagctccatgttgttttcggcaaacaggctgaaaatttctgctttactatacgggctacggtcggtggtactcacgccatcaatagcgccaccggtattcgttccggtcagtgcctgggtgttggaacttaagtccttcatccgttgctgattccactccgtacccagcgtcagcgtctggttaacgaggaaatcaatcggcaggttaacttcgctgtgcagcatcacgtcatcaagatcgatatcgacgaaatcctgtgtcgctttttcgttaaatttcccttcggtaccgcccgccagaccttccggaatacggctgttacgggtgtgttcgtactgcacccagttgctggtggtcacgccgttatcccagccaccgttccaggtcagcgcgtagttctggcgatacagacggttggtttcatcgccatatttgctgcgggtataggaatcggagttggtattctgggtgtcgcccgcatacaggttaccctggcggctgtaacctgcttccagttccaggctttgcaatggcgcgaaatcccagcgcaccacgccattaatatctttgttgattaccccttcgcgcccggctggtaacgtcgtggcatacgttccggcacgcgcggactgatggccctggttgatatcccacgcgtcagcctgggttttgtcgaggttgccatacaaacggaagctgaattcgtcgcccagcggaccggtcaggctaaagttagtgcgtttggtggcaccttcctctttatgttctggcgcattgaaatatgcgtcccaggagccgtgccactcgccgctgccttttttggtaatgatgttaaccacgccgcccgccgcgccgttgccataacgcgcagctgccggaccacgcagaacttcaatacgttcaatcatttcaggtggcacccaggaagtatcaccacgggtatcgcgctcgccacgccagccctgacgcacgctgttacggctgcttaccggcttgccgtcaatcaaaatcagcgtgttttccggacccataccgcgaatatcaatctgtcggttattcccacgctgaccactggtggagttaccggtcaggttaacgcctggcatggtacggatgatcttgctcacatcgcgggcaaccgggtttttgcggatttcatctgcggtgatggtgctaacgccaggcgcctgtaagttctgctcggcggcggtaacgacaatagtatcgtcatgactaacaggagtatcggtcggctcttgtgcctgcgctaccccataaatccccagattgaccaacaaggccagggaatgaatcttcttgttcattgttttattcctgcatttttgccacgaattgcaactgtcgggcatggtcgtcatcaacacgacgcatcccgctaccgcgaaaacctttgatcctgaaagacacgcagtgcagttggttaattaatgtccgcgcttcccacggcgcgccattacgctattgcaaatgcaaatagttatcaataatattatcaatatatttctgcaatcaatgaaaaattgcacagtaaacatggggttatggtgtgacggcgttaaaagtaggaagtgagagctggtggcagtcgaaacatggcccggaatggcagcgtctgaatgacgaaatgtttgaggtcactttctggtggcgtgatccccaaggttctgaagaatacagcacgataaagcgcgtatgggtctacatcactggtgtgaccgatcaccatcagaacagccagccccagagcatgcagcgaattgcaggcactaacgtctggcagtggacgacacaactcaatgccaactggcgcggcagctactgctttattcccaccgaacgcgatgacattttttctgtaccatcccccgatcgcctcgaattgcgcgaaggctggcgaaaactattaccccaggcgatagccgatccgctgaacctacaaagctggaaaggcgggcgagggcacgctgtttctgcactcgaaatgccgcaagcgcctctgcaaccgggatgggattgtccgcaagcgccagaaatacctgccaaagaaattatctggaaaagtgaacggttgaaaaagagtcggcgtgtatggatttttaccaccggcgatgcaacagcagaagaacgcccgctggcagttttgctcgatggcgaattttgggcgcaaagtatgcccgtctggccagtgctgactagcctgacccatcgtcagcaacttcctcccgccgtgtatgtgttgatcgacgctatcgacaccacgcaccgcgcccacgaactgccgtgtaatgcggatttctggctcgcagtacagcaagagttattacccctggtgaaagctattgccccttttagcgatcgtgccgatcgcaccgtggttgccgggcagagttttggtgggctttccgcgctgtatgccggactgcactggcctgaacgctttggctgtgtattaagccagagtggaagctactggtggccgcatcggggcgggcagcaagagggcgtgttacttgaaaagctaaaagctggtgaagttagcgccgaaggtctgcgcattgtgctggaagcgggtattcgcgagccgatgatcatgcgggccaatcaggcgctgtatgcgcaattacaccccataaaagaatccattttctggcgtcaggttgacggcggacatgatgcgctttgttggcgcggtggcttgatgcaggggctaatcgacctctggcaaccacttttccatgacaggagttgaatatggcattcagtaatcccttcgatgatccgcagggagcgttttacatattgcgcaatgcgcaggggtaattcagtctgtggccgcaacaatgcgtcttaccggcaggctgggacattgtgtgtcagccgcagagtcaggcgtcctgccagcagtggctggaagcccactggcgtactctgacaccgacgaattttacccagttgcaggaggcacaatgagccagcatttacctttggtcgccgcacagcccggcatctggatggcagaaaaactgagtgaattaccctccgcctggagcgtggcgcattacgttgagttaaccggagaggttgatagcccattactggcccgcgcggtggttgccggactagcgcaagcagatacgctgcggatgcgttttacggaagataacggcgaagtctggcagtgggtcgatgatgcgctgacgttcgaactgccagaaattatcgacctacgaaccaacattgatccgcacggtactgcgcaggcattaatgcaggcggatttgcaacaagatctgcgcgtcgatagcggtaaaccactggtctttcatcagctgatacaggtggcggataaccgctggtactggtatcagcgttatcaccatttgctggtcgatggctttagtttcccggccattacccgccagatcgccaatatttactgcacatggctgcgtggcgaaccaacgcctgctagcccatttacgcctttcgctgatgtagtggaagagtaccagcaataccgcgaaagcgaagcctggcagcgtgatgcggcattctgggcagaacagcgtcgtcaactgccgccgcccgcgagtctttctccggcacctttaccggggcgcagcgccagcgcagatattctgcgcctgaaactggaatttaccgacggggaattccgccagctggctacgcaacttagtggtgtgcagcgtaccgatttagcccttgcgctggcagccttgtggctggggcgattgtgcaatcgtatggactacgccgccggatttatctttatgcgtcgactgggcagcgcggcgctgacggctaccggacccgtgctcaacgttttgccgttgggtattcacattgcggcgcaagaaacgctgccggaactggcaacccgactggcagcacaactgaaaaaaatgcgtcgtcatcaacgttacgatgccgaacaaattgtccgtgacagcgggcgagcggcaggtgatgaaccgctgtttggtccggtactcaatatcaaggtatttgattaccaactggatattcctgatgttcaggcgcaaacccataccctggcaaccggtccggttaatgaccttgaactggccctgttcccggatgtacacggtgatttgagtattgagatcctcgccaataaacagcgttacgatgagccaacgttaatccagcatgctgaacgcctgaaaatgctgattgcccagttcgccgcggatccggcgctgttgtgcggcgatgtcgatattatgctgccaggtgagtatgcgcagctggcgcagctcaacgccactcaggttgagattccagaaaccacgcttagcgcgctggtggcagaacaagcggcaaaaacaccggatgctccggcgctggcagatgcgcgttacctgttcagctatcgggaaatgcgcgagcaggtggtggcgctggcgaatctgctgcgtgagcgcggcgttaaaccaggggacagcgtggcggtggcactaccgcgcagcgtctttttgaccctggcactccatgcgatagttgaagctggagcggcctggctaccgctggataccggctatccggacgatcgcctgaaaatgatgctggaagatgcgcgtccgagcctgttaattaccaccgacgatcaactgccgcgctttagcgatgttcccaatttaacaagcctttgctataacgccccgcttacaccgcagggcagtgcgccgctgcaacttagtcaaccgcatcacacggcttatatcatctttacctctggctccaccggcaggccgaaaggggtaatggtcgggcagacggctatcgtcaaccgcctgctttggatgcaaaatcattatccgcttacaggcgaagatgtcgttgcccaaaaaacgccgtgcagttttgatgtcagcgtgtgggagtttttctggccgtttatcgcaggggcaaaactggtgatggctgaaccggaagcgcaccgcgacccgctcgctatgcagcaattctttgccgaatatggcgtaacgaccacgcactttgtgccgagcatgctggcggcatttgttgccagcctgacgccgcaaaccgctcgccagagttgcgcgacgttgaaacaggttttctgtagtggtgaggccttaccggctgatttatgccgcgaatggcaacagttaactggcgcgccgttgcataatctatatggcccgacggaagcggcggtagatgtcagctggtatccggcttttggcgaggaactggcacaggtgcgcggcagcagtgtgccgattggttatccggtatggaatacgggtctgcgtattcttgatgcgatgatgcatccggtgccgccgggtgtggcgggtgatctctatctcactggcattcaactggcgcagggctatctcggacgccccgatctgaccgccagccgctttattgccgatccttttgccccaggtgaacggatgtaccgtaccggagacgttgcccgctggctggataacggcgcggtggagtacctcgggcgcagtgatgatcagctaaaaattcgcgggcagcgtatcgaactgggcgaaatcgatcgcgtgatgcaggcgctgccggatgtcgaacaagccgttacccacgcctgtgtgattaaccaggcggctgccaccggtggtgatgcgcgtcaattggtgggctatctggtgagccaaagcggcctgccgttggataccagcgcattgcaggcgcagcttcgtgaaacattgccaccacatatggtaccggtggttctgctgcaacttccacagttaccacttagcgccaacggcaagctggatcgcaaagccttaccgttgcctgaactgaaggcacaagcgccagggcgtgcgccgaaagcgggcagtgaaacgattatcgccgcggcattcagcagcttgctggggtgtgacgtgcaggatgccgatgctgatttcttcgcgcttggcggtcatagcctactggcaatgaaactggcagcgcagttaagtcggcaggttgcccgccaggtgacgccggggcaagtgatggtcgcgagtactgtcgccaaactggcaacgattattgatgctgaagaagacagcacccggcgtatgggattcgaaaccattctgccgttgcgtgaaggtaatggcccgacgctgttttgtttccatcctgcgtccggttttgcctggcagttcagcgtgctcagccgttatctcgatccacaatggagcattatcggcattcagagtccgcgccccaatggccccatgcagacggcggcaaacctggatgaagtctgcgaagcgcatctggcaacgttacttgaacaacaaccgcatggcccttattacctgctggggtattcccttggcggtacgctggcgcagggtattgcggcgcgactgcgtgcccgtggcgaacaggtggcatttcttggcttgctggatacctggccgccagaaacgcaaaactggcaggaaaaagaagctaatggtctggacccggaagtgctggcggagattaaccgcgaacgcgaggccttcctggcagcacagcagggaagtactagtacggagttgtttaccaccattgaaggcaactacgctgatgctgtgcgcctgctgacgactgctcatagcgtaccgtttgacggtaaagcgacgctgtttgttgctgaacgcacacttcaggaaggtatgagtcccgaacgcgcctggagcccgtggatagcggagctggatatctatcgtcaggattgtgcgcatgtggatattatctctccagggacgtttgaaaaaattgggccgattattcgcgcaacgctaaacaggtaaattaatattatttataaacccataattacagaaaataattatgggttttttatttgtttgatttataggtttgatgaatatttctcttaaatagagtgaatgttgcattcagtggaaggaatttacaaacttcagcttcggataattatcaccaactggtaaagtgagcgccgtggagatttccccctattggactcattttcaggttataccccatgagtagtctgaatattaaacagggaagtgacgctcattttcccgattatcctctggcgagccccagtaataatgaaattgatttacttaatctaatcagtgttttatggcgggccaaaaaaacggtcatggcggtcgtttttgcgtttgcctgcgcaggcttgctgatctctttcatcctgccgcaaaaatggaccagcgcggcggttgtcacgcctccagaacctgttcagtggcaagagttggagaaaagtttcactaagcttcgtgtgctggatctggatatcaaaattgatcgtacagaagcatttaacctgtttatcaagaagtttcagagcgttagcttgctggaagagtacctgcgtagtagtccttatgtgatggaccaattaaaagaggcgaaaatcgacgaactggatttgcatcgcgcaattgtcgcattgagcgaaaaaatgaaagcggttgatgacaatgccagtaagaaaaaagatgaaccgagtctgtatacctcctggacgctaagttttaccgcgccaaccagtgaagaggcgcagaccgttttgagcgggtatatcgattatatctctacgttggtggtgaaagagagcctagaaaacgtccgtaataaactggagatcaaaacccagtttgaaaaagaaaaactggctcaggatcgcattaaaacgaaaaatcaacttgatgcaaacattcagcgcctcaattatagtctcgacattgccaacgcggcaggaattaaaaagcccgtttacagtaatggtcaggccgttaaagatgaccccgatttttctatttctctcggtgcagacggtattgaacgcaaactggaaatagaaaaagcggtcactgacgttgcggaactgaacggtgaattacgtaatcggcagtatcttgtcgagcaattaacaaaagcacatgtcaacgatgtgaattttacgccgtttaaatatcagttaagcccgagtttgccagtgaaaaaagacggtccgggtaaggcgattattgtgatcctttccgcgttgatcggcgggatggtggcttgtggtggcgtgctgttgcgctatgcgatggcatccagaaaacaggatgccatgatggcagaccacttagtttaactatttgcggtactaggtgccgttcgtccgagcggcaccacaagcggcgttccggcaactggatcgtcaatgatcatgcagcgcagaccataaatgcgctcaatcagttcagcagtgacaatctccttcggcgctccctgagcaacaattttcccttcccgcaatgcaatcaaatggctggcgtaacgacaggcctgattaagatcgtgcagcaccgccgccagggtatagcctttttcgcggttcagttcgcttaacaactccagcaaatcaatctgatgactgatatccagccaggtcgtgggttcgtcgagcagcataattgccgtttcctgggccagcaccatcgcgatccacgctcgctggcgttgtccgccagaaagggtatccacgctttgatctgccagatgagttattcccgtggcctgcattgctttcgttaccgcttcttcatcctctttgcgccagcgggtaaacagcggttgatgcggataacgtccacgcgccaccagctcctgcacggtgatatcgcccggcgtggtagcattttgcgccaacagaccaatccggcgtgcaacctctttactggcgtaatgttgaatgtgctcgccatccagccagacatgcccatgagcaggcgtcatcaggcggcttaaggtacgcagtaacgtggatttaccgcagccatttggcccgataattgccgtgaagtgaccatcaggtatttctacagtcagattttccgcaacggtatatttgccatatcccagggttaactgttcgccgcgcaaacgggctacactttcggtcattttttgcgagactcctgaattaacaagacgataaggtaaataccgccgaggctgacggtaacgacgccaaccggaagttgatacggcataaacagttgttgggcgcagagatcggccgccagcagtaacagcgccccgcatagcgccgcctgggttagcccccagcgagcggtgccgctaatgcgtcgggcaatgtgcggtgcgactaaagcaataaaggaaatcggcccggcaagcgctgttgccgcagcggtaagcaccactgcaaccagcatcattaacagacggctacgttcgacgctgacgcccagcgcacacgcggtatcatcgcccatttccagcaagcgcatccggcgtaccagtaaggcggcggcaatgagcatcaatataatgatgggtgcggaagggctggtttttgcccacgtcaggccgttgaggcttccggcattccacaaacctgctgttagcgccgtttctaaagacgctttcagcaacagccaggtattaaaggccaccagcatggcgcgaacgccgataccgataataatcaaccgaaaggtgtcgatgccgttgcgccaggcgagcagccagaccagcaggctagtgacaatgccgcccaccattgcactcagcgcgatagccgtcaggtcctgaccaaacagcaccatcgccaccagcacgccgctccacgccccggtgttaaagcccattacgtcagggctgccgagcgggttacgcatcaggctctgaaaaatcgcgccactgacgcccagtgctgcgccaatcaacagcgccatcagcacgcgtggtaaacgccattcggtgaccaccatcgtcatactgcgcggcgcatcgcccatcagcgcggcgaatacctggctggtttccagcgtgacggcaccgctgcgtaatccccagatacctgcaaccacacaggcggaaaccagcagcaaacaggtgatgagtaatcggcgagagacgtaaatcatgcaccacctcgcgttttacgtcgcacgaggaagatcagcaccggtgcaccaataaacgcactgaccacagaaacgcgcagttcgccgggcacaatcacccgcccgatgatatcggcaaacagcagcagggcaggggtagcaagtagcgtgacgggcaggctccagcgatgatcggcacccaccagccaacgcgccatatgcggcatcatcaggccaataaaggcaatcgggccaactattgccgtcgcactaccacaaagcacggtaatcgccagcagaccaatcaactgtgtgcgcgccacgcgactgcccagcgccgtcgcggtgtcgctgccgaggctcaaactgttcagcgcgcgactcagtaatagcgcagttgctccggcgatcagcaccgggatcagcaccacttttaaggtatgtagattgcgaatatccaggctaccggcttgccagaaacgcaactgatcgtagacgtcaggattaagcagggcgatgccgctggtcagtccttccagcaccgccgccagcgccacgcccgccagggttaaacgcaccggacttaactgcccgccgccctgactgccggtaaaggcaacaatcaaactggccaccagcgccccggcgaaggccatcgccagttgttcctgcgcggaagagtaaccaaacagcgccgcacccagcacaatggcaaagctggctccggcgttcacgccaagcaagccggggtcggcaagtgggtttcgggtgagggtttgcattaacgccccggcaaggccaagcgcgccgcctgccagtaaaccggcaagggtacgcggcagccgcgcgtcgagcacgatggtgcagtcggcgctctggcaggtgccggagaaggcctccagcactacggaagcggggagactttttgccccaatgagcaggcttaatgccgtcgcgataatcagtaataacagcaatccgggcacggcaatggcgcgtgtcacggcaacagaaccagacatacgaacttccatgataatgaaattaattatcgttatcgatcttatttggatatgttagcatgtgcagcctaagaataggtatttaaaatatttgatggcaaggcattgtaatgaataaacaatcctggctgcttaacctcagcctgttgaaaacgcacccggcgtttcgcgcagtattcctcgctcgtttcatcagtattgtgtctctgggtttgctcggcgtcgcggtgccggtgcagatccagatgatgacacattccacctggcaggtggggcttagcgtgacgctgaccggcggcgcgatgtttgttggcctgatggtcggcggtgtgctggcggatcgctatgagcgcaaaaaagtgattttgctggcgcgcggcacctgtggcattggcttcattggactgtgccttaatgcactgctgccggagccgagtttgctggcaatctatttacttggtttatgggatggttttttcgcaagccttggcgttacggcgctattggcggcgacaccagcactggtagggcgtgaaaacttaatgcaggccggggcgatcaccatgttgaccgtgcgtctggggagcgtgattagccccatgattggcggtttattgctggcgaccggtggcgtagcctggaactacgggctggcggcggcgggcacgtttattaccttgctaccgttgttaagccttccggcgttgccaccgccaccgcagccgcgtgagcatccgttgaaaagtttactggcaggatttcgttttctgcttgccagcccgctggtgggcgggattgcgctgctgggtggtttattgacgatggcgagcgcggtgcgggtactgtatccggcgctggctgacaactggcagatgagtgcggcacagattggttttctctacgcggcgatcccgctcggcgcggctattggtgcgttaaccagcgggaagctggcacatagtgcgcgaccagggttattgatgctgctctccacgctgggaagcttcctcgccattggtctgtttggcctgatgccgatgtggattttaggcgtggtttgtctggcgctgttcggctggttgagtgcggtcagcagcttgctgcaatacacaatgctgcaaacgcaaaccccggaagcgatgttagggcggattaacggtttgtggacggcgcagaacgtgacgggcgatgccataggcgcggcgctgctgggtggtttgggcgcgatgatgacaccggttgcttccgcaagcgcgagcggttttggtttgttgattatcggcgtgttgttattgctggtgctggtggagttgcgacattttcgccagacgccgccgcaggtgacagcgtccgacagttaatgcttaaaacagcgccttaagcctatccagcacttgcatggcgctgtagtaatccagacggaacgtctcggttcccagcgcataaacctgcttgttttgtactgcaggcaggtgcgcgagcagcggattagcataaatagcatcggcatctttctgatcaccggcgaacaggaatagactctcgccatttaaccctgcagccagattttccccaccaagctgaatgatgtcatggcgtttaccctgactttggctggcatttaaccctgcgggtaacttcgccagcgtaaagccgagttgttccagcatctgcccttgtgcactttctggcgtccagagattggcactgtgtgcagcggcagtatagacaatggcagtgaccggctgcggcggtaatttgatttgctctttcgccgccgccagttgcttatcaaactgcgcaatccgctctgccgcttgtttctcatgcccggtaatttcgccaagttgcgttaacaggctctgccagcttttgtcgtcgtaattgatgattaatgtcggggcgatggtggaaagctgatcatacagtgccagcgcgctatccccgccggttgcgctaattaaaatcagatccggcatttgcgcggcaacggcttcggcgctcggttcgccgatatagagccgttgcagtttgcgttctttcgccaccttgctccactggcgtaaaaagccctggtcatccgcgacgcggttattcggcgtggtcgcgccgctggcgatcaccggagcatcaatcgccagcagactgccggtcagggtgacgctggtggaaacaatacgctgcggctggctttccagtgtatgtgtgccacggctgtcagtaatctgacgcggccagtcagcggcctgaactgcggctattccactaagcaaaagtcctgttaatagaagggcgttgcggtagagcggggcgagtctcacaaatcagcttcctgttattaataaggttaagggcgtaatgacaaattcgacaaagcgcacaatccgtcccctcgcccctttggggagagggttagggtgaggggaacagccagcactggtgcgaacattaaccctcaccccagccctcaccctggaagggagagggggcagaacggcgcaggacatcacattgcgcttatgcgaatccatcaataatgcttctcattttcattgtaaccacaaccagatgcaaccccgagttgcagattgcgttacctcaagagttgacatagtgcgcgtttgcttttaggttagcgaccgaaaatataaatgataatcattattaaagcctttatcattttgtggaggatgatatggatacgagtctggctgaggaagtacagcagaccatggcaacacttgcgcccaatcgctttttctttatgagcccgtaccgcagttttacgacgagtggatgtttcgcccgcttcgatgaaccggctgtgaacggggatagccccgacagtcccttccagcaaaaactcgccgcgctgtttgccgatgccaaagcgcagggcatcaaaaatccggtgatggtcggggcgattcccttcgatccacgtcagcctagcagcctgtatattcctgaatcctggcagagcttctcccgtcaggaaaaacaagcttccgcacgccgtttcacccgcagccagagcctgaatgtggtggaacgccaggcaattccggagcaaaccacgtttgaacagatggttgcccgcgccgccgcacttaccgccacgccgcaggtcgacaaagtggtgttgagtcggttgattgatatcaccactgacgccgccattgatagtggcgtattgctggaacggttgattgcgcaaaacccggttagttacaacttccatgttccgctggctgatggtggcgtcctgctgggggccagcccggaactgctgctacgtaaagacggcgagcgttttagctccattccgttagccggttccgcgcgtcgtcagccggatgaagtgctcgatcgcgaagcaggtaatcgtctgctggcgagtgaaaaagatcgccatgaacatgaactggtgactcaggcgatgaaagaggtactgcgcgaacgcagtagtgagttacacgttccttcttctccacagctgatcaccacgccgacgctgtggcatctcgcaactccctttgaaggtaaagcgaatagccaagaaaacgcactgactctggcctgtctgctgcatccgacccccgcgctgagcggtttcccgcatcaggccgcgacccaggttattgctgaactggaaccgttcgaccgcgaactgtttggcggcattgtgggttggtgtgacagcgaaggtaacggcgaatgggtggtgaccatccgctgcgcgaagctgcgggaaaatcaggtgcgtctgtttgccggagcggggattgtgcctgcgagcagtccgttgggtgagtggcgcgaaacaggcgtcaaactttctaccatgttgaacgtttttggattgcattaaggagcgaggatgagcattccattcacccgctggccggaagagtttgcccgtcgctatcgggaaaaaggctactggcaggatttgccgctgaccgacattctgacgcgacatgctgcgagtgacagcatcgcggttatcgacggcgagcgacagttgagttatcgggagctgaatcaggcggcggataacctcgcgtgtagtttacgccgtcagggcattaaacctggtgaaaccgcgctggtacaactgggtaacgtcgctgaattgtatattacctttttcgcgctgctgaaactgggcgttgcgccggtgctggcgttgttcagccatcagcgtagtgaactgaacgcctatgccagccagattgaacccgcattgctgattgccgatcgccaacatgcgctgtttagcggggatgatttcctcaatactttcgtcacagaacattcctccattcgcgtggtgcaactgctcaacgacagcggtgagcataacttgcaggatgcgattaaccatccggctgaggattttactgccacgccaagtcctgctgatgaagtggcctatttccagctttccggtggcaccaccggcacaccgaaactgatcccgcgcactcataacgactactactacagcgtgcgtcgtagcgtcgagatttgtcagttcacacaacagacacgctacctgtgcgcgatcccggcggctcataactacgccatgagtagcccaggaagcctgggcgtctttcttgccggaggaacggttgttctggcggccgatcccagcgccacgctctgtttcccattgattgaaaaacatcaggttaacgttaccgcgctggtgccacccgcagtcagcctgtggttgcaggcgctgatcgaaggcgaaagccgggcgcagcttgccagcctgaaactgttacaggtcggcggcgcacgtctttctgccacccttgcggcgcgtattcccgctgagattggctgtcagttgcagcaggtgtttggcatggcggaagggctggtgaactacacccgacttgatgatagcgcggagaaaattatccatacccagggttacccaatgtgtccggatgacgaagtatgggttgccgatgccgaaggaaatccactgccgcaaggggaagtcggacgcctgatgacgcgcgggccgtacaccttccgcggctattacaaaagtccacagcacaatgccagcgcctttgatgccaacggtttttactgttccggcgatctgatctctattgatccagagggttacatcaccgtgcaggggcgcgagaaagatcagattaaccgtggcggcgagaagatcgctgccgaagagatcgaaaacctgctgctgcgccacccggcggtgatctacgccgcactggtgagcatggaagatgagctgatgggcgaaaaaagctgcgcttatctggtggtaaaagagccgctgcgcgcggtgcaggtgcgtcgtttcctgcgtgaacagggtattgccgaatttaaattaccggatcgcgtggagtgtgtggatagtcttccgctgacggcggtcgggaaagtcgataaaaaacaattacgtcagtggctggcgagtcgcgcaagtgcctgaaggagagaacacgatggctattccaaaattacaggcttacgcactgccggagtctcacgatattccgcagaataaagttgactgggcctttgaaccgcaacgtgccgcgttgttaatccatgatatgcaggactattttgtcagcttctggggcgagaactgcccgatgatggagcaggtgatcgcgaatattgctgcgctgcgcgactactgcaaacagcacaatatcccggtttattacaccgcccagccgaaagagcagagcgatgaagatcgggcgctgttgaatgatatgtgggggccgggcctgacccgcagcccggaacagcaaaaggtggtggatcgcctgacgccagatgccgacgacacggtgctggtgaagtggcgctacagcgcgtttcatcgttctccgctggagcaaatgctgaaagagagtggacgtaaccagctgattattaccggggtatatgcccacattggctgtatgaccaccgcaaccgacgcatttatgcgcgatattaaaccgtttatggtggcggatgcgctggccgatttcagccgtgacgagcatttgatgagcctgaaatatgtggccggacgttctggccgggtggtgatgactgaagaattactgccagcacctatccccgccagcaaagcggcgctgcgtgaggtgatcctgccgttgctggacgagtccgatgaaccgttcgatgacgacaacctgatcgactacggtctggatagcgtgcgcatgatggcgctggcggcgcgctggcgcaaagtgcatggtgatatcgactttgtcatgctggcgaaaaacccgaccatcgacgcctggtggaagctactctcccgcgaggtgaaataatggatttcagcggtaaaaatgtctgggtaaccggcgcaggtaaaggtatcggctacgccacggcgctggcgtttgttgaggcgggagcgaaagttacaggttttgatcaagcgttcactcaggagcaatatccctttgcgaccgaagtgatggatgttgccgacgctgcgcaggtcgcgcaagtgtgtcagcgactgttagctgaaacggagcgactggacgcgctggtcaatgcggcgggaattttacgcatgggcgcgaccgatcagctcagtaaagaggactggcagcagacttttgcggttaacgtcggcggtgcgtttaacctgttccagcaaaccatgaaccagtttcgccgtcagcggggcggggcgattgtcactgtggcgtccgacgccgcgcacacgccgcgtattggcatgagtgcttatggcgcaagcaaagcggcgctgaaaagcctggcgttgagcgtcgggctggaactggcgggtagcggcgtgcgctgtaatgtggttagccctggctccaccgacaccgatatgcaacgcacgctgtgggtgagcgatgacgccgaagaacagcgtattcgcggctttggcgagcagtttaaactcggcattccgctggggaaaatcgcccgtccacaagagatcgccaacacgattttgttcctcgcctctgacctcgccagccatattaccctacaggatattgtggtcgatggcggcagtacgctgggggcataagcatgatctggaaacgccatttaacgctcgacgaactgaacgccaccagcgataacacaatggtggcgcatctgggaattgtgtatacccgtctgggcgatgatgtgctggaagccgaaatgccggttgatacccgtactcatcagccgttcggtttactacatggcggcgcgagcgcggcgctggcggaaacgctgggaagcatggccggatttatgatgacccgcgacggacagtgtgtggtaggcacagaacttaatgcaacacaccatcgcccggtgtctgagggaaaggtacgcggcgtctgccagccgctgcatcttggtcggcaaaatcagagctgggaaatcgtcgttttcgatgaacaggggcggcgttgctgcacttgtcggctgggtacggcagttttgggatgaacccgacagaattagatgagattgcaggaaaactcggttaacggagtgatcgagttaacattgttaagttaaatattggtttcaactccgatttacatggttgctgtgttgttaaattgtacaaagatgttatagaaacaaaatgtaacatctctatggacacgcacacggataacaactatgaacaaaagtgggaaatacctcgtctggacagtgctctctgtaatgggagcatttgctctgggatacattgctttaaatcgtggggaacagatcaacgcgctgtggattgtggtggcgagcgtctgtatctatctgatcgcttaccgtttttatgggctgtatatcgccaaaaatgtgctggcggttgacccgacgcgtatgacgccagcggtgcgccataacgacgggctggactatgtgccgacggacaagaaagtgctgttcggtcaccattttgcggccattgccggagcaggtccgctggtggggccggtactggcggcgcaaatgggctacctgccggggatgatctggctgctcgctggggtggttctcgccggtgcggtgcaggatttcatggtgctgtttgtttctacgcgccgtgacggtcgcagcctgggtgagctggtcaaagaagagatggggccaaccgccggggtgattgcgctggtggcctgctttatgatcatggtcattatccttgcagtgctggcgatgatcgtggtgaaagccctgactcatagcccgtggggaacatataccgttgcgttcaccattccgctggcgctgtttatggggatctacctgcgctatctgcgtccggggcgtattggcgaagtgagcgtcatcggtctggtattcctgattttcgccattatctctggcggctgggtggcagaaagtccgacctgggcaccgtactttgactttaccggcgtgcagttgacctggatgctggtgggttacggttttgtggcggcggtgctgccggtgtggttactgctggccccgcgtgactacctctctaccttcctgaaaatcgggactatcgtcggtctggcggtaggcattttgattatgcgcccgacgctgaccatgcctgcgctgaccaaatttgtcgatggcactggcccggtatggaccggtaacctgttcccgttcctgtttatcaccatcgcctgtggcgcggtgtctggcttccatgcgctgatctcttctgggaccacgccgaagatgctggcgaacgaagggcaggcgtgctttatcggctacggtgggatgttaatggaatccttcgtggcgattatggcgctggtttccgcctgtatcatcgatccgggcgtgtattttgccatgaacagcccgatggcggtgctggctccggcagggacggcggatgtggtcgcttctgccgcgcaggtggtgagtagctggggctttagcattacaccagatacgctaaaccagattgccagcgaagtgggtgaacagagcatcatttcccgtgcgggcggtgcgccgacgctggcggtggggatggcctacattctgcacggcgcgctgggcggcatgatggatgtggcgttctggtatcacttcgccattttgtttgaagcactgtttattctgacggcggtggatgcaggtacgcgtgctgcgcgctttatgttgcaggatctgctgggcgtggtgtctcctggcctgaagcggaccgatagtctgcctgctaacctgctggcaacagcgctgtgcgtactggcgtggggctacttcctccatcagggcgtggtcgatccgctgggcggcattaacactctgtggccgctgtttggtattgccaaccagatgctggcagggatggcgctgatgctctgtgccgtggtgttgttcaagatgaaacgtcaacgttacgcctgggtggcgctggtaccaacggcctggctgctgatttgtaccctgaccgcaggctggcagaaagcgtttagcccggatgcgaaagtcggcttcctggccattgctaataagttccaggcaatgatcgacagcggcaatattccgagccagtatactgagagtcagctggcgcaactggtgttcaacaaccgtctggatgccgggttaaccatcttctttatggtggtcgtggtggttctggcactgttcagcattaagacggcacttgcggcattgaaagatccgaagccaacggcgaaagaaacgccgtatgaaccaatgccggaaaatgtcgaggagatcgtggcgcaggcaaaaggcgcacactaaagtcagagtgagggggggatgttggcgaatgttggcttagtgcccagggttccctctcaccctaaccctctccccggtggggcgaggggactgaccgagcgcgttgatagcatttgtaggccggataaggcgttcacgccgcatccggcactctttcagcaacatggttagcggaggccaagatgtttgatagtctggcaaaagccggaaaatatttaggtcaggcggcgaagctgatgattggtatgcctgattacgacaactatgtcgaacatatgcgggttaaccatcccgatcaaacgccgatgacctacgaagagtttttccgtgagcggcaggacgcgcgctacggtggaaaaggcggcgcgcgctgctgctaaatttgtacgtcaggctttaaagctttccacttttttgaacgctgcacgcaacgtatctggtgtcagcgtgactggcaggtaatgaatggactccaccggacgcagggtgtgggcaatcactttgtcgatctccgcctgattattgatatccacttccagctccgccagtgtagtcggcagatgaaaacgctgatacgctccagttaattgcgccagcacatcatcctgacccagcaaggcgctttgcaccagaattccgtaggcgactttggtgccgtggagaaacttctcggtttgcggcagcacggtcagaccgttatgcacggcatgagctgccgccacacgcgtaaaacgatcgcccagaccaccaaccatcccaccaccagcaataatagcatccaccacatcgcaaaaactttgcgttaactgttgattttgctgatcgctcagcgcctgttcgctactgtttaacaagacgtcgcgaatggcttgcgcattattgatccccagtcgcacggttagcggcaacgtttctggttgcggagccagcaccaccgcttcataccatttcgccagcgtgtcaccgatccccgccagcagatattgttgcggtgcattgaggataatctccggttccaccagcaccataaaattggcgtcgtcgaaaatctcataatgcagcgcctgtccggcatcattataccagacggagagcggtgtccaggcggcgcaggtggcggcgatcgtcggaacggcaacaaacggcagaccgagacggcgggcgagggctttcgcggtgtcgagcagtgcaccgccaccgacgccaatcaccacgctgcggtcgtcaccggactcagccgccagttgttgtacatcgctttcgctgcaatgaccgcgaaacaaaatatgctttgcccctggcagtccaaacgctggcggaagtttggtttgcgccgcagcaatggcgcgtttgccgtagatccacaccgcgcgagaaagttgttcatcagtgaaaaaatcgtgcaggtgattgaaacttcctggatgactaaagtagttagccgggccgacgaccacgcggataggattgtgaggcatgttgtgttgtccttattgttttatttagacatctaaacgtcttgattgccaaatactagcatcgtgttatagtgccttcaacacgcaacttcgtcaggtacaataaaaatgacaaataaccctctgattccacaaagcaaacttccacaacttggcaccactattttcacccagatgagcgcgctggcgcagcaacaccaggcgattaacctgagccaaggctttcctgattttgatggtccgcgctatttacaggagcggctggcgcaccacgttgcacagggggcaaaccaatacgcgcccatgaccggcgtgcaggccttgcgcgaggcgattgctcagaaaacggaacgtttgtatggctatcaaccagatgccgatagcgatatcaccgtaacggcaggggcgacggaagcgttatacgcggcgattaccgcactggtgcgcaatggcgatgaagtgatttgttttgatcccagctatgacagttacgcccccgccatcgcgctttctgggggaatagtgaagcgtatggcactgcaaccaccgcattttcgcgttgactggcaggaatttgccgcattattaagcgagcgcaccagactggtgatcctcaacactccgcataaccccagtgcaactgtctggcagcaggctgatttcgccgctttgtggcaggcgatcgccgggcacgagatttttgtcattagcgatgaagtctacgagcacatcaactttagtcaacagggccatgccagtgtgctggcgcatccgcagctgcgtgagcgggcagtggcggtttctagttttggcaagacctatcatatgaccggctggaaagtgggttattgtgttgcgccagcgcccatcagcgccgaaattcgcaaggtacatcagtatctgacctttagcgtgaataccccggcacagctggcgcttgctgatatgctacgtgcagaacctgagcattatcttgcgttaccggacttttatcgccagaagcgcgatattctggtgaatgctttaaatgaaagccggctggagattttaccgtgtgaaggtacatactttttgctggtggattacagcgcggtttctaccctggatgatgttgagttttgccagtggctgacgcaggagcacggcgtagcggcgattccgctgagcgtgttttgcgccgatcccttcccacataaactgattcgtctctgttttgccaagaaggaaagcacgttgctggcagcagctgaacgcctgcgccagctttaattatttaaccgtccaggcgcgggaatattgacggtcggcaaacaactcttgcaggccgttaatttgcttcaggcgcagcacttcgtcgctgtccattcccagctctttgccaattttattatcgtcccatcccaactggctaagttcacggacgatttcgctcatggcggtgatttgatggcgtccacgagcgcgattatgacgaatagtcgcggcgatgcgttgattacgcgtaccttccagacaggtcaccggcaaataaccttttaagcgtaattttaaactactactgcctttaccaatttcatggcggtgaaaaccatccacgatttccatggcatttttatccgtatgtgtgaccacaatgggttgggtaaaaccatctatttcaatggatttttgcagcagttttttttcgggtggtgccacgttgtttgggttgtaatcattaggcataagttggctgtttttaacccacagaacgcaatccactggctcttcacgaaaggggctaacctgatggatcgccatgcggatttcattaatcgctttgatgcgatcatcttccggcaagctggcgagaaattgcgttaaatcctgcgttaatcgttgttgcatagtatcccccattcctgacgttttccttttatccgttcgttataacgctgatagttcttgctttttgtggggctaaaacttaatgcccgacaccagtaatcgttattgagtaaaactttgcatatccgccgccaggaggggatatctttcgcgccaatgtccccttgctgggtttgtggaacctcgatgccttttttctgataccagtgcaaataaatggcgattttattgcggtaatgctcagctgttttttccggcatgctattgagcagcaataatgcatattcttgccagtctaaatgttctggcttgaggattttccgatgcccatagaaatgattgtcatgtccggcgtaaatgccgccactttttaccccgctgactcgtgcgcacatagcagcccagcgatccggttcgataacgtgatagagccataatccttgtcgttgctccgggccaaaaggttcgcaaattcgcatatgacgcagaggaacgcctgcctgatacattaggttatacagtgggttgcagagactttgatgatttgcataccaggtccagatatcagccactttccagtcgtaaatggggtaaatgtaccagctatgaccgcctggtgcggccgtagtccagggtttatcgtcggcaaaacgttgtttatttaaactggcgatggcgacaaaacggttgtaggactcatccgcacggatgccgatcatcatcgccgccggacgtttttgactaaaccattcggcaaactcacgtacaaattgttcgaaggtcatgcctggctggtaaaagcagaaaaagtcagggtcggttatcgcatcttggggaggttgacgtacccattcgacatcaggttcccagcactgccattcgggttggtattgactaagggaattttgcgtcgtaagcgggagcgcaacccagtaaaactcttcgatgacatcggtgtacaactcgcgcagggactgaacatagttaatggtgcaagagaattgcgcctcccagtcgataaacaaaacgcagatttttttgcccatttgtcgggcaagttcggctgtcagatgcagcattaaaccagagtctttgccgccagaaaaactgacacaaacgcggggtagggtgttgagtgtccaggtaatacgctctcgtgcagcttccagaatattgagcggaagaggaattttataaatagacatctgaagacgctctctgaacgttacagggtgatcagtgagataagtctgttaattataaagtaaacactgtaaagcagagtgttttatttttcattcgcgctgtgaataaatagatgaaagttatagtagctgtctgtagttatatatcaaaaactctcatttagacggtcaataaatcgggagaacaccaaattatttaaagaagatttattataggaaatgtaaagctttatactaggtaacggatgttctagttttatctcttttaagttaagaaagtcacggtaggaattataaagttcataggggactattcccagtaaatctgtaactgcaatgctattaatgattgtcagcaaagaggaaccacgaaaactgattttgcgattcataaatctctcgtctatttccatttgaatatcatcaacccctgcacttttagatattaattgggtgaactcttctgccataatttgttcataagtgctattgtcagtaattcgtggatgcctattactacaaattagagtattgcgaatcgtatgcaatggcatgcaaatgacggaacggctgatcactggcatttgggtgatcaccagatcggctttgcggtgaaccaacagttcttcagcattctctgcactcatgaggatatcatggcactcaatctcgacagaggaatcttgccgtaggcagcggatcagcatactattattagagcaagaaatgagctgagggccgtagataataaagtttttctttagttcggacttattgactatattaattgtttgttcaaggcctctgagatttttctcaagatggtgatgcagatttaaccctgttgtcgtcggcgcgataccttttccactgcgaatgaataaagggtcattaaattgcgcacgtaagcgttgtaagctctggctcacggcacttggggtgatatatagactttcagcagctttgctaatgcttaaatgctggtaaatacactcaaatatgacaagaagatttaagtcgaactttttcaagtcgtagagattggccatacactactccggttatatttttcttccatgatatattcacttaatcaatgttttttgcgtatatatttttattgattatgtttttttgcttaactcaggattaagtttttctaaaatagcacagccacttagggcagagcgagcaattcatgcttttttaggatggttgaaaagcagggatatagttcaaccatccatgaattaccttttatttattccccataatgatattaagcgttttctgatcgggcaaccccacggcctgttgtagcgtattttccttactcatgtaatagatagccggcgtgacatttgcccccagatcgtccatcagtttctcattgtcacttaacactttcatttgctctgtacttacgtttgcaggcacgtttagcttaagcttgccaccagaggcttcatattgttgccaggtttttgcgggatctttggaggcaagaattgccgctgctgtcgccgggctttctggcttgataaccccaaccaacaatgttcttaattgcactttgccagaatctacccacgggcgcgcctgctgccagaactgtttacaatatgggcagaacggatcggcgaagacgtagacaatgaccggcgcatcttttttaccgtcgaggagccagtgggattgttccatccgttgccacatttcgcgtccggctggtgcgtaaatttctttttcgataagtgtgttactcaggttttcacctttctcgttgtacatgtaaccagagatagcgtgcttaccatctggagtcaggtagatggtgacgcccatatcctgacactttccgagataacctttcattcctccgggggcatcgaatgttttgatgattgtaatgccctgtttttcaatcgcttttactggagcaggaagttcctctgcgaaggcgattgcaggaagcagagccagtaaaagtatcttttttaacattaatttgtccttttcagtcagtgcaaaagtcgagtaaaaggcataacctatcactgtcataggtaagagcttagatcaggtgattgccctttgtttatgagggtgttgtaatccatgtcgttgttgcatttgtaagggcaacacctcagcctgcaggcaggcactgaagataccaaagggtagttcagattacacggtcacctggaaagggggccattttactttttatcgccgctggcggtgcaaagttcacaaagttgtcttacgaaggttgtaaggtaaaacttatcgatttgataatggaaacgcattagccgaatcggcaaaaattggttaccttacatctcatcgaaaacacggaggaagtatagatgtccttgattaacaccaaaattaaaccttttaaaaaccaggcattcaaaaacggcgaattcatcgaaatcaccgaaaaagataccgaaggccgctggagcgtcttcttcttctacccggctgactttactttcgtatgcccgaccgaactgggtgacgttgctgaccactacgaagaactgcagaaactgggcgtagacgtatacgcagtatctaccgatactcacttcacccacaaagcatggcacagcagctctgaaaccatcgctaaaatcaaatatgcgatgatcggcgacccgactggcgccctgacccgtaacttcgacaacatgcgtgaagatgaaggtctggctgaccgtgcgaccttcgttgttgacccgcagggtatcatccaggcaatcgaagttaccgctgaaggcattggccgtgacgcgtctgacctgctgcgtaaaatcaaagcagcacagtacgtagcttctcacccaggtgaagtttgcccggctaaatggaaagaaggtgaagcaactctggctccgtctctggacctggttggtaaaatctaaatttccttcgtctttcacgccatagcggcgttggcgtcgcccgctcaccccggtcacttacttgtgtaagctcccggggattcacaggctagccgccttgctctgacgcgaaatacttcggaaattcacctaattcttcgggtgctgcggcacccgattttcttccccgcaccatgatgcaagctgcatccaggtagccgcagaggccgcttgcatgatgatgtttaaagcccaggagataaacatgctcgacacaaatatgaaaactcaactcaaggcttaccttgagaaattgaccaagcctgttgagttaattgccacgctggatgacagcgctaaaagcgcagaaatcaaggaactgttggctgaaatcgcagaactgagtgacaaagtcacctttaaagaagataacagcttgccggtgcgtaagccgtctttcctgatcaccaacccaggttccaaccaggggccacgttttgcaggctccccgctgggccacgagttcaccagcctggtactggcgttgctgtggaccggtggtcatccgagcaaagaagcgcagtctctgctggagcagattcgccatattgacggtgattttgaattcgaaacctattacagcctctcttgccacaactgcccggacgtggtgcaggcgctgaacctgatgagcgtactgaacccgcgcatcaagcacactgcaattgacggcggcaccttccagaacgaaatcaccgatcgcaacgtgatgggcgttccggcagtgttcgtaaacgggaaagagtttggtcagggccgcatgacgttgactgaaatcgttgccaaaattgatactggcgcggaaaaacgtgcggcagaagagctgaacaagcgtgatgcttatgacgtattaatcgtcggttccggcccggcgggtgcagcggcagcaatttactccgcacgtaaaggcatccgtaccggtctgatgggcgaacgttttggtggtcagatcctcgataccgttgatatcgaaaactacatttctgtaccgaagactgaagggcagaagctggcaggcgcactgaaagttcacgttgatgaatacgacgttgatgtgatcgacagccagagcgccagcaaactgatcccagcagcagttgaaggtggtctgcatcagattgaaacagcttctggcgcggtactgaaagcacgcagcattatcgtggcgaccggtgcaaaatggcgcaacatgaacgttccgggcgaagatcagtatcgcaccaaaggcgtgacctactgcccgcactgcgacggcccgctgtttaaaggtaaacgcgtagcggttatcggcggcggtaactccggcgtggaagcggcaattgacctggcgggtatcgttgagcacgtaacgctgctggaatttgcgccagaaatgaaagccgaccaggttctgcaggacaaactgcgcagcctgaaaaacgtcgacattattctgaatgcgcaaaccacggaagtgaaaggcgacggcagcaaagtcgttggtctggaatatcgagatcgtgtcagcggcgatattcacaacatcgaactggccggtattttcgtccagattggtctgctgccgaacaccaactggctcgaaggcgcagtcgaacgtaaccgcatgggcgagattatcattgatgcgaaatgcgaaaccaacgtgaaaggcgtgttcgcagcgggtgactgtacgacggttccgtacaagcagatcatcatcgccactggcgaaggtgccaaagcctctctgagtgcttttgactacctgattcgcaccaaaactgcataagaagaagtaagattcacctgcaattgcttagccgccggggtcaaacctggcggcttttttatggcattaaaaagccccgccgggatggctccgggcagggcgggatacttattctggcaattaacgcacaaccagcaccggcagattggcgtggcggatcacgctgctggcgttagaacctaacagatgggtgctaatgcttgggttgcgagaaccaataactacaacatcagcccccagttcttctgccaactcattgacttcatcccgcacgctaccaaaacggacatgttgtttaatgcgggaaggatcgatggtgaagtggctgaccatcgtttgcagacgttcttgtgcttcatgttgcagatgctcttcaaaacgacgcacatcagcggcaaaacggtgcaggctcaggctggcactcccgggtagtacgtgaagtagatgaataactccgtcatcctgggcgaggaattcagcgtggcgaacagctttgtcgctcaattccatttcaaatacatcaactggcataatgattgtcttatacataaccctttctccctgttaatcatgaacaaatcattcgccatgattataatatttatccctgatatttgtctggttctttttccttacgaactgtttctgtgatgaatatattctcactgaacaccaggaattctcccaaaacctgtggtaccgcccgttttcccgctgtgatagctacccttaaagactgactcttttttgaactgtctctggaggttgcatgaaagcattgacttatcacggcccacatcacgttcaggtagaaaatgttcccgatccgggcgttgaacaggcagatgatattattctgcgtattacggcaacggcgatctgtggctctgacctccatctttatcgaggcaaaatacctcaggttaaacatggcgatatttttggtcatgaatttatgggggaagtagttgaaaccggaaaggacgtaaaaaatttgcaaaaaggcgaccgagtggtaattccgttcgtcattgcttgtggcgactgttttttctgtcgattgcaacaatatgccgcctgcgaaaataccaatgcgggtaaaggcgctgcgctcaataaaaaacagataccagctccagcggcattgtttggttatagtcacctgtatggcggcgttcctggtgggcaggcggaatatgtccgcgtccctaaagggaatgtggggccgtttaaagtaccgcctttgcttagtgatgataaagcgcttttcctttctgatattctgccaacggcatggcaggcagcaaaaaatgcgcagatccaacaaggtagtagcgttgcagtctatggtgctggtcctgtgggattgttgacaatcgcctgtgcacggttgctcggtgcggaacagatttttgttgttgatcatcatccctaccgcttgcatttcgccgccgaccgctacggcgcgatcccgattaattttgatgaagacagcgatccggcacagagtattattgaacaaacggcaggtcaccggggcgtggatgcagtaatagacgccgtcggttttgaagcgaaaggcagcaccacggaaacggtgctgactaacctgaaactggagggcagcagcggtaaagcgttgcgtcagtgtattgcggcggtcaggcgtggcggcattgttagcgtaccgggcgtctacgctggatttattcacggtttcctgtttggcgacgcctttgataaagggttgagctttaaaatgggacagacccacgttcacgcatggctgggagaattattaccgttaattgagaaaggattactgaaaccagaagaaattgttacccactatatgccgtttgaagaggccgcccggggatatgagattttcgaaaaacgtgaagaggagtgccgtaaggtgattctggtacccggtgcacaaagcgcagaggcggcgcagaaggcggttagtggtctggtgaatgcgatgccggggggaacaatatgatcgtcaggagtggttttcgaggtaaaggacagccatgacgataatcgccgccataatcagaaatcctatcaggatgtaaaatgcttctgccatggttattcccacaaacgaaacggaataattttgcagcaaaagtgaacagtgagaaccaggaaaaattgctgattttgcgtaaagaggatgcgagtgcatcctctgggcaaagcgagttatcgcttgtgcagatgggattaaagcaggtagtcgccagcagcttctggctggtattcgagttccagcacttcaaggtgggttgcaacgccgcccggaagttcccagtgaatggaatcgccaacgcgcagccccagcagtgcggcacctaccggagccataacggaaagctgagtattgctatcggtcatttttgccggatacaccagcgtgcgcacacgcacttcgccatcgctaagattgcggaatttaacccggctgttcattgtcaccacgtcgtgtggcatctcttctgggctacacatttgggcgcgatccaactctgcgtttaacgcgtcggcgattggcaaaccagcataggcgggttgctccagcagaatatcgatgcgttcggcatccaggtcgttaatgatgatagttggtctggacatttttactccatgtcgtcggtgctgcgagtgtcgcagataaacatacccaaaagaaaaccctcaccgtcaggcggcgagggtttaactcacatgatgatactgactgttgctcactctttgaagtgatttgcgtcacattcagggaattcctcaatgcagcgcattatgtataaatcttaatcgccttggtttatggaagacgaattagcgtgttttgtaaatcagatgattaataacccgctttatcaatcacaaaggttttgccacagttacctgggtgaggttgtggcaagaaactgtttgcagaaagcggagcgttgatggcgtcagctttgatgctgatctgaatttcagtcaaatacgcagggttaccctggcacgttagcttaactgctttcacgttctcttttccccagcttttggcaaaggcggcgtcaaagtcacggcggctcactgttttaccgtaattatccgcaaggaattttccggcttcgctctctttaatttcttgattcaggcgtaccatcgtaccgaagtatgcgtccggatcaaaaccaaagcaggcaccgtgtttggcatattcgtagcgttccaggcaggaacgtccgccagctcctggcatgacttcacttagtttagcggccgtttccagacttaatccggtttccgggctactacacattcggctggcgcgcgcttctggtagattcgggattgggcgagtagcgcaaccgaagcgcatccagcggcgttcatcaacaccacgggcagcaacgcttttaggcaatcctggccacagaccatgtacggtcagaaaatcagctttgttggtcgtttcggtttgcaggcgacattcatctcgttcgttacgatttcgatcgtgttgactctggcaaaatccggtttgccaggagagggccaggacatagcgatcaaaatcgccatactgttttgcctgcaacgctaaggcgttggcagaagagaagggaagcagagaaaccgcgagcaacgcggcgttacgccagaatgctttcataatgggtgtggaactcatacatacactgaatactatctattaaatcataaaaaagcccgccaggtgggcttacctggcgggcgtgatgatttattcagcgtttggcgaacgtattagttccacatggcgagaatcggccagccaaccaacagcaacatagagatgtaaatcaccccgaagattgcgccaagacgccagtaatctttacttttcacatagccacagccgtaaataatcaccccaggaccggttgcatacggcgtcagacagcccatgataccgatagacagcaccagcaggatacacagttgttccattggtacgcccggaatacctttaccgacggccagaataaccggcagcatggttgcggtgtgcgcagacaggctggcaaacaggtagtgtgcaaagtagaacaccagaaccagtacaatcaccgttgcgtttggactgaatccttccaggtgcgtactcatggtaccggcgaaccagtcaataaaaccagaacgagtcaggccgttagccatcacaaccagagttgccaggttgaccagtgtgttccatgcgctgttatagcgggtaatgtctttccaaggcacaacgtgcagggccagcattaggctaactgccagcagaccaaccgcagtagcattaatgacttcactgccaaatacccacaaacctaagctgagcaatacaaggccaatcagtgtccactctctgcgtgtcagcgcacccatggttttcagttcatcacccgcccaggttgccacttcttcactgtgtgtgatttccggtttgtacagcacgtaggaaagccacggcgcaatgataagcaagataaccccaaccggcaggaagcagaggaaccactgcaaccagctaatctggataccggcaattttgctgacgaactccagacccagcacgtttggtgccgcaccggtgacaaacatggagctactcagactggtactaatgaccatcatccacatcaaatagccgccaatacgacgcgcggacggatcgttcgggaaacttttaaacaacggcggcaggtttttaatgaccggaaaaaccgtacccccggtacgcgcggtgttggaaggtgtaaacggtgccagcagaatgtcgataatgacaatcgcataacccaacgtcagcgtgcgtttgcccatgaatttcaccaggaaaagggcaatgcgacgacctaacccggaaacttcataccctaatgcaaaaataaatgcgccaaataccagccataccgtggtgctggaaaaaccagccaggccccatttcagcgcctgtttttgcgcattaaacgctgggtcagctaattctttggcatcaaagagcaggtaattactgccaataacgcaaatagtaaccgcaataaaactgatcgctgttgccggaattggctcgaggatcatgccgacaatcattgccacaaacacagcgaagtaatgccatgcctgcggcggcataccgtcggggacagggataagaaacatgacacccatcaccaccagtggggccaatagtttccatatattatcttttgctaaagacatacgggttctccgaaaattaatatttccaaatttatcaagtgcttaaataattaaatctgtgctaaaaaccaggtaaggatcagtaggtcagcactgccgcctggactgagatttcgttcgatacactccctgtcgaactgccggagataatcgagatcggcgggggttcgaatgccccctttttgcaataatgtttgcgcctcgcgctgtagccagcgcaggcccccctcgccaccgcggcttgcaacgttggtatcgccgttgatcgccatcagtaggagcaaggtatcgagcaatgccagttcaggatctaacccctgatccagcagagtgaggtaatgcggcaaggcgtgattgatcaccagtggataacccgcttcggcttcaccgcgtgcgccggtaaggccaagctgttggtacaaccgttgacctgccgtcagttgactattattggtacgcagttcgcgatcggtcaggccacggcagaaacttgccgccgtagaacaaacggttgttggcgttaccggttggttgagttgaagcaaacggccaattgccgcacatagcagccctaaagaaaaaatgctgcctttatgcgtgtttacgcccgcagtggcgcggaacatatcaccttcgcaagccataccaattgggcgtaatccgtggagtaccgcttctggtgccatttccgcactacaggcaccaaattcaatgaaacggggtagccagccctgaatcgccagcgcgctgcggtggaaatcttccagcgccatatctttgtgcgcaccgcagttaatgcgatccacgaggcctggtttcggactcagattgacttcagtcagcatggcgcgccagcccagcagggcgtactcatcgattaaactcgtcgcaagctttgtggttttagtactcgttgcaggcatgctcatcgttcagcagtgcctccatgttatttagttgacgttgcaggcatcgacatcgttcagcagtgcctccatgcggttgagtaaatcggtcagttgatgggtttttccacgcgcgcagacggctgcgctttgttcgcacaacaggcagcggcgaggcggcagactatagtcgcggcgggagagaatttcgccttcgggcgtcaggacatcgatatcccataaccgcccgagaggatgactatgttcaagctcaatggtggcgagcttgaggtcgcgagccggggcggcaatgctcaacatgccctccggcccgctggcggaaaccagtgcagcctgctcctgaatttgccagccctgttttgcggctaaggcacgcaaggctgtcacgccatgattaaaaattcggcgtgtgacctcgctgtctttaatcggcccaggcgcaaccacggtaaaggagaccagtggaacaggatggcgcttgagccagacgtgttgccgtgcttgcctttcatcccggctgacgagcagctcgggaatacttaccgcatggtggctggcgagttcaggaagcaggtgcatggcttattccttcacctgatgcacaacatcgatcacgctgccatcgcggtaacgcacaacggcaacgacgcggtctgtgaattcaatcggctgtggttcaccggtcagcagacgcgcacgttcgcgcagccactcaatggaaaccactttaatgcccgcttcctgcagacgttctgccagttccggacgtgccgggttaactgcgataccgtggtctgtgaccagaatatcgacactggagcctggggtgatgcaggtcagtacgttatccaccagagtcggaatacgaccgcgtaccagcggcgcgacgatgatggaaagcgcagaggcaatcgcggtatcgcagtgaccaccggaagcaccacgcagtacgccgtcagagccggtcagcacgttaacgttgaactgggtgtcaatttccagcgcgctcagtaccaccacgtcgagacgatcaacgcttgcgcctttgctaccccagttagcgtactggttggcgctgatttcgatgtgattggggttacgggccaggctttgcgcagcatggctgtcaaagctctgcacatccagcagtttgcggatcagacctttttcgtgcaggtcaaccatcgtcgcggtaataccgccaagggcgaagtcggcgcgaatatcgcggctacgcattttgtcttccaggaaacgggttaccgccaggcttgcgccgccggtgccggtttgcatggagaaaccttctttgaagtagccagagttgacaatcacatccgcagcgctacgggcaataagcagttcgcgcgggttagtggtcatacgggtcgcgccagcgccgatttttgcagcatcgccaacgcggtcaactttgacgatcaaatcaacctgatcttgctcaatgcttgccggattatgcggataaggcagcagttcttcggtaagcatcacgacctgttttgcgttgtcggcatcaactattgcatagccgagggagccgcagcaggctttaccggtgtagccgttggcattaccgaattcatcacaggacgggacgccgaggaaagccacgtcgatattcagttcgccgctctgtaccagatgcacacgaccgccgtgagagtggatctgcaccggttctgccagcagaccacgggagatctcttccgccagtggaccacgcaggccggaggtataaatgcgggtaaccacgccctggcgaatgtgttctaccagcggcgcatggcaatcactcagggagctggacgccagggtcaggtttttaaagcccatcttcgcgatgacgtccatcaccatattgacggtcaggtcaccgccacggaaagcgtgatggaaggaaaccgtcatgccgtcctgtaaaccagagcgacgaatcgcttcttccaggttggcgcacagtttgcgatcgcgcgctttttcagcctggtaggtttgctttgggctgttctggaaagcggcaagatcgcattcagcgcgacgattccaggccgctacccgttcttgtcgttgagattgttcaattttctgcgtcattttgattgccttattcttcgcggatgccggaaagttctgcacgggagagcaccagacgggcgcgatcgataaccggaccgtccaccatcttgccgttcagggaaaccacgccgaggccttcgcgagcggcggcttcagcggcttctacgacgcggcgggcgtgatccacttctttctgggtcggtgcgtagaggttgtgcagcagatcaatctgacgcgggttgatcaggcttttgccgtcaaagcccagctgtttgatgtgggcggcttcttgcagaaatccggcttcgttgttagcgtcggaatagacggtatcgaacgcctgaatacccgcagagcgcgcggcctgcaaaatggaacagcgtgcgaacagcagttcagttccttccggggagcgttctgtacgcaggttgcgcacatagtcttctgcaccgagggcgataccgatcaaacgctcggaagcgtgagcgatttccactgcgcgggtaatccccagcggagattcaatcgccgccagcaggccggtgctgccgggttcacgaccacaggctttttcgatacgcaggatctctttttcaatatccagaacatcctgagcggtatcggttttcggcagacgcacaacgtccgcaccaccgcgaacgacggcttccaggtcgttaacaccccattcggaatccagcgcgttgacacgcacaatggtttcaatatcgcgatacagcggatgttgcagcgcgtggtaaaccatgcggcgggcggtgtctttttcacgcaatgctacggagtcttcgaggtcaaacatcagggcatcagccgggtagatgaaggagttgctgaccatcgcggcattggcaccaggcacaaacaacatgctgcggcgggtgcgagttttacgttgttgcaggctagcggaaatcattggcaatcctcccatggcagagccgggataccgctggcgcgtgccagcagggcttccagtcgtgcacgtaaaatgcagtacagtgcgcctttgtcatcgacattcagctgtacgccgcgcacgttgtagcgggcgagaacgtccagaatggtggtgcgaattgcatcgccaaactgtttctcaacgctgctattgatttgcaggtcgatatcctgcgtatcgagtggggcgatgcgtatcatcacatccccagactcaagggtgcctgcaacggcgggctggtttattttcatttttcacctgtttctcatgcgggggtcttttgacgagctgccgcgtcctggcgggagtgctcaagcaggttctgcaaataatgcagcgtgactgcagggaccagcggcgcgatagccgtgagatcgtttttcgccagcagttgacgtacccgggaagcggatatcggcatctcctggtaacgcagccgctcaatttcaaccagttcgatgggcggtgcggagatagtcggcgtttccagccagtagcgcatatcctggttgtactgggcggtaacgcgacaaaagggttcagtaccgacaaagcggtgagttacacccagcgcgggagcgaggtactgacggaaaatcttcagatcaatttcggtgtaacaatggttaatgacgctctgttctttaatgaagtagcaagggaacgtagcgcgggagatgatgtattcggagccacgatgcacagtcaggcgtggaatatcggcggtgccttttaacaccaaatccagccggtcttcataggggaagcgactagaatcttctttgactaaaaacagatgcaaccagtcgcactgtgccgcagcctgttgaatcagataacggtgaccattcgtaaagggattggcgttcatcacaatgcagccaatcttgttccctggatgacgaaattttttcaggctttcggcatagcgtttcagtcgcgtggcgctgttttccatcagcaccatcacgccgggtacgctggtcagcgtggaaaaaccgcactggcggaacagcgcctcgtattcggttttggtataaataaacagatgcgtgctgtgccgctcataggcgaggtttatcaattcagtggctaatgtcagcgccagtccttcaccgcggacggattcactgatagcaacgcatttaataatatttccggcaattccaccgcacgcgataagcttttcatcgcgggttacggtaataaatacttcgactgtggtgtcaacgctcaaatcattttcatgcaggaattgggcgatttccgccatttttttattttcactacgttttacgcgggtgaaaatatcattgccgaacataataaatagtatcctgaaggtgcatgttgttatcgatttgcaacgaatgttgttcaatgttgcaaactgataaccttttattttcacttgggagaaagggggtgatcgaggtatatctttttctcctttcgctatacatcctaaggagtatttcggcgtgaaattttgatttatttcacatagagttagtggttttttatttatttaatgattttaagttttttaattaatgtaattacgaaatgactcgcaggtttaagtgatttaattgatttaatgaataaaatttgccacgatcataattaatatctatgtattttgattcaacattttaattacatccgtcaaagaggctcgggacaacccgcaaggaaaacaatgttgcagcttaacgagaataaacagtttgcatttttccaaagactggcatttccgctgcgtatctttttgctgattctggtgttcagtatatttgtcattgcagccctggcgcaatattttacggccagttttgaggactatttaacgcttcatgtacgcgacatggcaatgaatcaggcgaaaattattgcctccaatgacagtgtcatctctgcggtgaaaacgcgtgactacaaacggctggcgaccatcgctaacaaattacaaagagataccgattttgattatgtggtgattggggaccggcacagcatccgcctttaccatcctaatccggagaaaattggttatcctatgcagttcaccaaacagggcgcgctggagaaaggggagagctacttcattaccgggaaagggagtatggggatggcgatgcgcgccaaaacgccaatctttgatgacgatggaaaagtcatcggcgtggtgagcattggctacctggtgagtaaaatcgatagctggcgggctgagtttttattaccgatggcaggtgtgtttgtcgtgctgttagggattctgatgttgctgagctggttcctggccgcgcatatccgtcggcagatgatgggcatggagccaaagcaaatcgcacgcgtggtccgtcagcaagaggcgctgtttagtagcgtttatgaagggctgattgcggtggatccgcatggttacattaccgccatcaatcgtaacgcaagaaagatgctggggctgagttcccccggacggcaatggttgggtaaacccattgttgaagtggtcaggcccgccgatttctttaccgaacagattgatgaaaaacgtcaggatgtggtggcgaactttaacggtctgagcgttattgccaaccgggaagctattcgtagtggtgatgatttgctgggggccattatcagctttcgtagtaaagacgaaatttccaccctcaatgcgcaactgacgcaaataaaacaatacgttgagagccttcgtacattgcgacacgagcatctcaattggatgagcacgctcaatggtctgttgcagatgaaagagtatgatcgcgtgctggcgatggtgcagggggagtctcaggcccagcaacagcttattgacagcctgcgcgaggcgtttgccgatcgccaggtggcggggctgctttttggtaaagtgcagcgcgcccgggaactggggctaaaaatgatcattgtccccggtagccagcttagccaactgccgccaggactggatagcaccgagtttgcagccattgtgggcaatttacttgataacgccttcgaagccagcctgcgtagcgatgaaggaaacaagatcgttgaattattcctcagcgatgaaggcgatgatgtggtgattgaagtcgccgatcagggctgcggcgttccagagtctctacgagacaaaatatttgagcagggggtcagtacgcgtgctgacgagcccggtgaacatggcattgggttgtacttgattgccagctacgtaacgcgctgcggtggtgttatcactctcgaagataatgatccctgcggtaccttatttagtatctatattccgaaagtgaaacctaatgacagctccattaaccctattgatcgttgaggacgaaacgccgctggcagagatgcatgcggaatatattcgtcacattcccggattcagtcagatattactggcgggaaatctggcgcaggcccgaatgatgatcgagcgttttaagccggggctaatcttgctcgataactatcttcctgacggtagagggattaatttactgcatgaactggtgcaggcgcattatcccggcgacgtggtgtttaccactgcagccagcgatatggaaacggtgtctgaagccgtacgttgtggtgtatttgattatctcattaagcccattgcctatgaacggctggggcaaacgctaacccgtttccgccagcgtaaacatatgctggaaagtattgatagcgccagccagaagcaaattgatgagatgtttaatgcttatgctcgcggtgaacctaaggacgagctaccgaccggcattgaccccttgacgctaaacgcggtgcgaaaactgtttaaagagcctggtgtgcaacatacggcagaaacggtggcgcaggcactgaccatcagccgcaccactgccaggcgttatcttgaatattgcgccagccgccatctgattattgctgaaattgttcacggcaaagttggcagaccacaacgcatataccacagtgggtgacatgataaagccggaggaaacttgcctccggcattactatttacttgcctgtgaccgctgctgccgttcctggcaccatcagctctgtagcaacgataacaatcaccaaaccaacaagcaccggtacgctggtgcgttttacgacttcaaacgggctgatcttcgccatcccggcaaccgcaacgactacgccagaaacggggctaagggtacggccaaggttactcgcctgcagcatcgggatagtcaaatacgccgggttaatgccggaagagtgcgccagtttcgggatcatctcaacaaacgcataaaacggcgcattgccactaccggtcgtgactgccgccagcattgtcagaatcaccaataccagcatcaggatgatactcgcgctaccaaagctggtagcgatagaaatcagactttgaataaagccgatggtgctaagcccctgagcgaataccccagcggcaaccagcagcatcaccacgttagcaaacgcatctgccatcccgcgataagccacttccagaccagagaaaactttctgggtattaaagctgcggaggaactccagaatggaggcaatcagcatacaaatcaccagaatagtgatgatgtgtaattgcggaccccatttaccgtcaaaaatcagtacaccgatgatcggcgtgaacggcaaaatggcataaaacgcaggagcagtggtggtgatttcactgacatctaacatttcatgagagatgtgctcttttttatccagataacgttgccagaagaagtgggcgatcgccatgccgataattgcagcaatactgataggcagcgtcgttttgaaggcgaagtcaatcaggctcatttcggaagcttgcgccgccagcaccacatccccactagtcggtgcgagaataatcgccgccggggaggcacaaatggcagcagctgcgccacgactgataccaacgtttaccatcaccggaaatagggttgccatcagcaaaacacccagaccggttgcggaagagacggccagagacatcagacaggcgacaaaataggcggcaatcatcagcaggtaaggggagttaatatactgcaatggtttactcgccagcttgaccaccatatcattcgcgccgatatgggtcatgtaagcggcaaatccacacagcatcataatcatcatgccgaggtcgccgccgcggctcattagtaatattttaacgtattcaacgatatccgtggcgctgtagcctgtactagcctggctggacggtaacactttgtgccccataatggcactgataatcagcaataacaggccaccgacaaataacacaccagtggcggaataccctttaatgatgtagcgagctacacccacaataaccacaaccccaataaggagctcaatgaatgtcagcataatttttcctgtctccaggccccaaagtaaataataaaaaattcctaaagcttaaggaaaaaatatgcccaataaattggcgatgaatgctgattaaaatcaagaaaaactgccattaagacattgaagttgctgtttttatacatagataacaaaacgcatatttagcggttggcaattatcacataataatgtgtgcaaattgatggtggattgatgcaaatttgttaattgcaatggtgttagctgcggctgtgcgctcaaaaaataatctaatatgagcataggttgacgatatatattatatacttcgttaagatgattgttgtatctcgttaaaaaataaaataatttttccttgattgcattttgtcatcaaaaaagacttggtttttcttttttgactattcccatcgcagaaaacgacgcatcatctttaatcgatgcgcggaaatatttaacttgaacaagcggaaataaatagagcagctattcagattattctttatgttgggtctattaaggttatgttaattgtagctttgctatgctagtagtagatttttgataaatgttttatggtcacaaatgaacgtgagtaaatatgtcgctatcttttcctttgtttttattcagttaatcagcgttggtaaagtttttgctaacgcagatgagtggatgacaacgtttagagaaaatattgcacaaacctggcaacagcctgaacattatgatttatatattcctgccatcacctggcatgcacgtttcgcttacgacaaagaaaaaaccgatcgctataacgagcgaccgtggggtggcggttttggcctgagccgttgggatgaaaaaggaaactggcatggcctgtatgccatggcatttaaggacagctggaacaaatgggaaccgattgccggatacggatgggaaagtacctggcgaccgctggcggatgaaaattttcatttaggtctgggattcaccgctggcgtaacggcacgcgataactggaattacatccctctcccggttctactgccattggcctccgtgggttatggcccagtgacttttcagatgacctacattccgggtacctacaacaatggcaatgtgtactttgcctggatgcgctttcagttttgagacaaatgaagttttagtaacttctttaaaatcaatagctaaaataagtaacatcaaaaataacgcgacttttatcactttttagtaaagttacactggacaaagcgtaccacaattggtgtactggtaaccgacacagcatttgtgtctatttttcatgtaaaggtaattttgatgtctaagattaaaggtaacgttaagtggtttaatgagtccaaaggattcggtttcattactccggaagacggcagcaaagacgtgttcgtacacttctctgcaatccagactaatggttttaaaactcttgctgaaggtcagcgcgtagagttcgaaatcactaacggtgccaaaggcccttctgctgcaaacgtaatcgctctgtaagatacgtcagcaagaattcaaaacccgcttaatcagcgggttttttttggtctttagtgtgcggtactggcgctaaacagccagaatgccagtgcggtcatggcaaaagaccccagaaggttgacgaaaacgttcagtaatgcccagccaaagcggccctcttgtaacaaaaacaccacttctgcgctaaatgtactgaaggttgttagaccgccacaaaatccggtggtgattaatactttccacactggatcaatgttcgtcatcctgctgaaccatgcgaatcctattcctatgatgaatgccccaatcaggtttgctgtcagcgtccccaacggaatcgcctgatgcagtgggttaaatcgcatacttaacagccatctcgccacgcttcccgtaccaccgccaataaaaactgctaaaagaagttgtaacactgcaaaatcctgctatttgatttgtatgagtgataagtgtaacgccgaataatcgtcgttggcgaattttacgactctgacaggaggtggcaatgctggttgccgcaggacagtttgctgttacatctgtgtgggaaaagaacgctgagatttgtgccagcttgatggcgcaggcggcggaaaacgacgcaagcctgtttgccctgccggaagcattgctggcgcgcgatgatcatgatgcagatctaagcgttaaaagtgcacagctgctggaaggcgaattcctcggactttacggcgagaaagtaaacgtaacatgatgacgacaattctgacgattcatgttcctagtacgccggggcgcgcatggaatatgctggtggcacttcaggcaggaaacatcgtcgcccgttatgccaaactgcatctctatgatgcatttgccattcaggaaagtcgccgtgttgatgctggtaatgaaatcgctccgttactggaggtggaagggatgaaggtcggtctgatgacctgttatgacttacgctttccagagctggcgctggcacaggcattacagggagctgaaatcctggtacttcctgccgcctgggttcgcgggccgctcaaagagcatcactggagtacgttgcttgccgctcgtgcgctggataccacctgttatatggtggcggcgggggagtgcgggaacaaaaatatcggtcaaagccggattatagatccctttggcgtcaccattgcggcagcgagtgaaatgcctgcactcattatggcggaagtgacgcccgaacgtgtgcgtcaggtgcgcgcgcaactgcccgtcttaaacaaccgtcgctttgcgccgccgcaattattatgatgtttttttactcggcgcttgattcaccttgttacagattgctattgtgtgcgcgcgtcgaatgaccgttaatattctctggtttttaaggcgcgttctgttgccggttatatgtcaagaaggtatctatgggtgagattagtattaccaaactgctggtagttgcggcgctggtcgttctgctgtttgggactaagaagttacgtacgctgggcggagaccttggagcggccattaaagggttcaagaaggcgatgaatgatgacgatgctgcggcgaaaaaaggcgcagacgttgatcttcaggctgaaaagctctctcataaagagtgacgtggcgagcaggacgctccctcaatatcttgttcgatacaaaaaacccgcttcaaaaagcgggttttttatcagacagatgtaagtaattattacaggattacttaacttccatccctttcgcctgcaaatcggcgtggtaagaagagcggacaaacggaccgcatgcagcatgggtaaagcccatcgccagcgcttcggctttcatttcgtcgaactcatccgggctaacgtaacgttgaaccggcaggtgatggcggcttggctgcaaatattgccccagcgttaacatcgtcacaccatgacggcgcaggtcgcgcattacctcaataatttcttcattggtttcacccagtcccaccatcagaccagacttggtcgggatttccggatgcgcttctttaaagcgttccagcagcttcaggctccagttgtaatctgcaccaggccgtacctgacggtaaatacgcggtacgttttccaggttatggttgaacacatctggtggcgttgcagtcagaatatccagagcacgatccatacgaccgcggaaatccggcaccagagtttcaattttgatttgcgggcttttttcccgaatggcagtaatgcaatccgcaaagtgctgggcaccgccatcgcgcaggtcatcacggtcaacggaggtgataaccacataacgcagcgccatatcggcaatggtctgcgccagtttcactggttcattggcatcaggagctaccgggcgaccgtgggcaacatcacagaacggacaacggcgggtacaaatagcgccgaggatcataaacgttgctgtgccgtggttgaagcattccgccaggttagggcaggaggcttcctcgcagacagaatgcaggccatttttgcgcattgcggctttgatgccctggatacgtgtagagtccgctggaagcttgattttcatccattccggcttgcgcagcagggcttcgcgctctgttgccacgtttttaaccgggataagggccatcttatcggcatcgcggtatttaacaccgcgttccatcacaatgggtttactcatagcgtgcgtgttccagttgcgaattacgaaggaaagcgtttcaattcaatagattgttgtaattatcaactatttttgaattaacgactggcagtatatcattgaaacggacctgaaagcagccaaagcggtcgcgaaaatgtaaaattgttgttggattgtgccattttatcgttctgcgctgtgatctggctgtaacaatactttttcaaaatgcattacggataacatctattactccgtgcaggatgggatcacgcaggctgaatttgttgtagtggatagagaaatctatttgctcctcatttaaggacggaaaaggcagtttttccagcggccagcagcggctaaacaggttataaaaacggctgggaataatcgctaacatgtcactgttggcaaccagtgcagcgattgtcaaaatgttgtagctggtgaaattgatttgccggtccggaaacatttcttgaactctctgccgcagaccgctgaaattttgctcttccggtaacagaagtacatgcgcagcgttgtcgatagtctctctgtcatcttctaaagagagtagtggatttccctcgcggcaaattaacaccatattgtcggtgaacagaacatgatgttgcaccgtacgattggtgcaaaacatgttatcgatgatgagatcggtttgaaactgactgagttggttttccgcgtcgctgatgggcgggttgcgcagtaaaagctgcggatagtgagttttaatcgcccgatagatgacaggaaggaccagtgctccgacgctgggagtggtcgcaatagttatcgttcgttgcttatcatagcttccttcgatatccagcgcgccaagaatggactcaaggccctgactgatatactcatgtagatgcatcgcaaatgcggtaggagtgacaccctggcctttgcgaataaacaatgggtcagggaatataacgcgcagtttctgaatagactgactgattgcgctgggggtcagattaagcactttcgctgcattaacgatccctttatgtacatatacagcttcaaaaatagtcagaaggttaagatcaatatttcgtaaggttgtaaatatttgtggtttaccttcactgctctttctgcttaaacagggttcaatttgattattactatccacgcacttactccaattttattcatggaaaaataatatttaaaaaattacaataatcttatgtctaattggaacggaacgcttttgctcaccataatcaactatttcaataggttaatcaatggggtgagttacggagcaaggcgtggcaccgcatttctgcaagtgataaagaaaatatacaaacgcgaaggagatgtaaagcattagcagatattatgagtaatgacccagtgtaaattgggccattgatgtatggaattaagcggtaatatattcgaagtccggattgtttagtagcgctaaaatattttccagtaaacgtggagcaatattattagtcgtcgcttcgggtttccattgacttattttagccatttccattccggcatacccacaaggattaatacgtaaaaatggactaagatccatattgacgtttaatgccagaccgtggaaactacaaccgcgtcgaatacgtaaacccagactgcaaattttcttttccccaacatagacacctggcgcgtcagcccgaggatgcgcttctatacccagttcagccagggtattcaccactgtttgctcaagcaaggtcaccagttcacgcacaccgagtttacggcgtttcaggttaagcaacacatacatcacctgttgccccggcccgtgataagtcacctgcccaccgcgatcgctctggatcaccggaatatcacccggcattaaaatgtgctccgcttttcctgcctgaccttgggtgaataccggatagtgctcgaccagccagatttcatcaagggtactatcatcgcgggtatcggtgaattcatgcatagcctgggagattggctcgtaaggctgaagaccgagctggcggacaagaattttatcctgatacaaaacggcatctccgtggagaatgagtaaaagtgggggaaaagtatatcacagcgaggagaggggagttacccgaccaggagccgggtaacggagaagcgagttacagaaccatgcggacaatatcgattttgcccagttcttcatacagtgtttcaacctgctcgatatgagtggcgttgatagtgatagatacgctgtggtagttgcctttgctgcttggttttaccgttggggtgtagtcacctggcgcatggcgctgtaccacttcaaccacctgatcaaccagctcaggtaacgcctgccccataactttgtaagtaaaaggagtagggaattcaagcagttcgttaagtttggttttcatgtcagctccggcgtaacgtaattaaatagcaactcccgccagaaggcgggagttttttactgatgcttagtatatggggacggaaattacactttcaagtgtttaatttttaaccaaaccagtgatggaacattaatttaatgtaatcaatgattttgccgaagaagttaccttccgggatttcttgcaacacaaccagcgggcgttgctcgatcgttttgccatcaagctggaagttgatagttccgacgacctgattcttttgcagcggcgcatgcaattcactgctgttcagcacatagctggctttcagatctttcatgcgaccacgcggaatggtcaggtacacgtctttatcaacccctaagctagcgcgatcagaatcaccaaaccaaaccggttcagaggcgaactctttacctactttcagtgggttaacggtttcaaagaaacggaagccccaggttagcagttttttactttcggcttcacggcctttaaaagtacgtccgcccattaccgcagaaatcaagcgcatctggccttcagtcgcagaagcaacaaggttgtaacctgctttgtcagtgtgtccggttttgatgccgtcgacattcaggctgttatcccataacaggccgttacggttcagctggcgaataccgttaaacgtaaattctttttctttatagatgctgtattcattcggtacgtcacggatcaatgcctggccgatcagcgccatatctcgcgcggagctgtactgaccatcagcatccagaccatgtaccgtctggaagtgggtatttttcaggcccagtgcgttaacgtagctgttcatcaagccaacaaaagcgtcctggctaccagcggcaaaatcggccatggcgacacaagcatcgttaccgctttgcaggttaataccgcggatcagctgagaaaccggaacctgcatgcccggtttgaggaacatcaggctagaacctttaaacaccgggttaccggtggcccatgcgtcgttgccgatagtgactaaatcagtttctttaaatttaccggctttcattgcctggccgataacgtaactggtcatcattttggtcaggctggcaggatcgcggcggacatctgcgttctgttcggcgagcactttgccggagttatagtcaatcaggatgtaggactccgcatcgatctgcggtacacccgggatcatagttttgatattcaggtcatcggcatgtgcagcagagataaaggctgtgcaaagagccgtggtgagcgccaggcgcttcatgatacgagcggaaaaaatggtattcatggtctgaactacgacatccgtgatggaattaaaaaagtgccctactatagcaaatgcactaccggcaggcatctgactttccgcgtgactttgttaacgtcatttacagaaattgacacatcagatgcctgctttacgttactgcgcggtagtaataaaactctgtaattgggcttcggtttgcaaacgttgctgcaaggtactggcttcggctttgctggcgaatgggccaagctggatccgccagaccgcgccattttgagttacgcgaccggggacgccgaacttctgtcccagttgctgttggtactgttgcgcacgagcctgatcgcttacggccccgacttgcaccataaagttgccgctggcgctttggctgacggcttgcggtgtcaccattgcagggctggttgcaggcgttgtgctcggagctgtaacaacgggctgtggcgcaggcgtcggttcgctgccttccagtacaccaggcgctaaggtcgttggtgcgccgaggaaaccgctactggttaccggcgcgccggtcggatcttcgctttttagcgtgctattactgaccggaagaatgtcaccctgcgggccagacacactacttgttcccgcgccaccgcttaaatcgggaggtgcaggcagggcgtaagtctgtttggcgactgtggtacaagccataccaggaccagaaaggctaccatcctgggcaacaataatcggatcgatacgaactttggtgttgttactcgtgttaagacggtcagctgccgcgcgagaaagactaataacgcggtcgttgccgtaagggccgcgatcattaatgcgcaccacgatcattcgcccgttagccaggttagtgattctggcgtagctggggatcggaagcgttggatgggctgccgtcagctgtgtcggatcgaatgcttcgccagaggccgtcaggttactgccgggttcggcatcatagattgccgccagtcccgcctggctaaatcgagacggatcctgcacgattttgtagcttttaccgtcgcgctggtaatcctgatttgccgtcgcgttcagtggttcgaaacgcgggtccgccccgctaatttcaactatagggccgttacataccgcaggctgcggtacacttaccgtctgttgctgaccatcatcgcttgtacatgccgcgagcattcctgccgcgatgcagatcccgagccactgcttacgcattgcgcacctcttacacgcttttgctcaacattttcctgtgggtgtggatactcattacaatcccgaacccagccatcagcacaattagcgcgcttcctccataactgaccagtgggagcggaacccctacaaccggcagaataccgcttaccataccaatatttacgaagacataaacgaataatatcagcattaagccgccagccatgacgcgaccaaaggtggtttgcgctctggcggctatccacagcccgcgcatgatcagcagaatgtagagagcgagcagaatcagaatgcccactaatcccagctcttccgccagtaccgcgaagataaagtcagtatggcgttcggggagaaattcaagctgactctgagtgccgtgcagccagcctttgccgcgtaatccgccggagccaatagcaattttagactgaataatgtgatagcccgcgccgagtgggtcactttccgggtccaggagcatcattacgcgctggcgctggtaatcatgcatcaggaagaaccacagaatcggaatgaacgccgctaccagcactactgcgacgccaatcagacgccagctaaggccagagaggaacagtacaaacagaccggaaagcgcaacgaggatacttgttcccaggtcaggctgtgcagccaccagcagcgtgggcataaatatcagcaccagcgcgatgccagtgttcttcaagcttggcgggcaaacgtcgcggttgataaagcgcgcaaccatcagtggtacggctattttggcaatttcgctcggctgaaaacgaacaataccgaggtccagccagcgttgagcacctttagagatggcaccgaaagcatctaccgccaccagcaaaataatacagatgatatagagatagggggcccagccttcataaacgcgtggaggaatttgcgccatcaccaccatgatgaccagacccatcgcgatttggccgattttacgctccatcatgccaatatcctgaccgctggcgctccagataaccagggcgctgtaaaccagcaatgccagtaagatcagcagcattgtgggatcgagatggactttatcccagaatgtttttttattcggattatccgtcatgattaatggtcctccgctgcggcaaccgctggattttccgcaggcagatcggtgttgttatcacccagcataatgtggtcgaggatctggcgcatcagtgtaccaaccgccggacccgcaccaccgttctccagaatcatggcgacagccacttgcggattgttgtatggcgcaaaggcggtcatcagtttgtggtcacgtaaacgctcggcaattttgtgcgcattataggtttcgttcgctttcagaccgaagacctgagcggtaccggatttcgccgcaattttgtacggtgcgctagcaaagtatttatgcgccgtaccgttagggcggttagcaacaccgtacataccgtctttcgccagctcccagtaaccggaatgaatatcgccgacgggcggttcatgcggctgtacccatggcacctgtttgccgtcttcggcggtgctcatcagcaaatgaggaaccttcacgataccgtcattaatcaggatcatcagtgccttactcatctggattggggtcgctgtccagtaaccctgaccgataccaaccggaatggtgtcaccctgataccacggttttttaaagcgtttctgtttccattcgcgggtaggcatgttgccggaacgttcttccgccaggtcgataccggtgtaatgaccataaccgaatttacccatccattcggagaggcgatcgatccccatatcgtaggccacctgatagaagaaggtatccgcagattcttccaggcttcttgtgacattcagacgcccgtggccccattttttccagtcacgataacgtttttcgctacctggcagttgccaccagcctgggtcaaacagcgtcgtattgcgcgtgatcaccccggcgctcaatgcgctaaccgccacatagggtttaactgtagacgcgggaggataaaccccctgtgtggcgcggttcaccagcggtgtattcggatcgttcaacaaggcggaataatctttgctggagataccgtcaacaaacaagtttgggtcataactaggcgtggaaaccagcgccagcaccccacctgtacgcggatcggtgactaccacagctgcgcggctacccgccagcagcgtttcaatatattgctggagtttgagatccagcgtcaggtaaatatcgtgtccggcttgcggtggtacttcttttaactggcgaataacacgcccacggttgttaacttcaacctcttcataaccggtctgaccgtgcagcacatcttcatagtaacgctcaatgcccagcttaccgatatcatgcgttgccgcatagttggccagtttgccgtcattattcaggcgttcgacgtctttatcgttgattttgctcacatagccgatgacgtgggtcaacgcgctaccgtaaggatagtaacgacgtttatagcctttaacttcgacacccggaaaacggtactgattgacggcaaagcgagctacttgtacttcggtcaggttagttttcaccggaatagaggtgaaacggtgactacgtgcgcgctcttttcggaatgcagcaatatcgtcatcggtcagatctaccacgctgcgcaaagcgtccagcgtttgctgcacgttatcgactttctccggcatcatttctatctggtagatagtgcggttgagggccagagggataccgttacgatcgtagataatgccgcggctgggcgcgataggcaccagcttaatgcggttttcattagagcgggtctggtagtcggtaaagcgaacaatttgcagattatacaggttggcgataagcacgccggtcagcagcaaaatccccaaaaaggcgaccagcgcccggcgcacaaacagcgcggactctgccgtatagtcgcgaaaagagttctgtagtttcatccgctgcgttttctactcaaagctcccttatcactcacggtgataaggatggttggtggtgatgctccacgcccggtacagactctctgcgaccagcacgcgaaccagcggatgggggagggtaagcgcgctcaggctccagctctgctcagccgccgctttacaggcagggctcaacccttcaggcccgccaatcagtagactgacgtcgcgaccatccagcttccagcgttccagctcagcggctaactgcggcgtatcccagggcttgcctggaatatcgagggtgacaatgcggtttttgcctgcggccgccaacatctgctcaccctctttgtcgagtatgcgcttgatgtccgcattcttgccgcgttttccggccggaatttcaatcagctcgaagggcatatctttcggaaaacgacgcaggtactcggtaaaaccggtttgtacccagtccggcattttcgttcccacggcgacaagttgcagcttcacgcattaactccagagtttttccagttcatacaggcgacggctctcttcctgcatgacatggacaatcacatcgcccaaatccacgacaatccagtcggcgctgttttcaccttctacgccgagcggtaacaggcccgctgcgcgagactcctgcacaacgtggtcagcaatggacataacatgacggctggacgtacccgtacagatgatcatgcagtcggtgatgctggatttgccctgaacgtctaaggcgatgatgtcctgacctttgaggtcatcaattttgtcgataacaaaatcctggagtgctttaccctgcaagttttccccctgggtgaatcaaatagataaaaatggtctgtcagtatacctgaaccagaggcgatttcgggacaattgtcgccgaatcggctttcgaaagtgggctatcatcccaccccgcgccgcagattgcatcgccatttttgtaaaacaatttctacaaagtcgtgtctggcggaaaaagtctggctgcggagaatatcagcctgcccgggtctgtcaatggtcgttgcggcttacccgtaaaaaaacagaaaagtcatgcattctcgaccccgatggcacggctattgaggacgcgtagcgtcgcgaatttttggttgatatcaatggcgctccaacacccctggtcaacgcgaaaatgccacatagcttcggcaggcatgccaattaaacgggcgattaacagactcagtacaccctgatggctgacgactaaaatattctgatagtgctgaaattcactaagccttgcgataaagcgttccacacgttggctaaatgcctgaaatccttcaccgttcgtggggattgcatgctgccagtcattgcaccacgcgctatagttttcggcatcttcttgcatgaggtcgcgatgatgtcgcatctcccagtcgccaaaaaacatttcgttgagttcaggtatgatttgcacggggagctggcggtcactgagaaccagtcgcgcggtatgctgtgcccgttccagttcactgcataaaaccagatcaaaggaaacaccatgtagcagcgtatgcagattttgcgcttgctcaataccgcgcgcggtcaggggggtgggcgcatgaccgctgtaaagaccatcgatattcgcttgcgtttcaccatgacgaattaaccacagtcgcatcatgccctccgtaacgacaggtatcagcgatacaagccttgttggttaatgtaagtcagtaccggttccggcaataaatcctcacaactttcaccgttttgcaaacgttcgcggatgatggtcgcgctgatgttaaaccacggcgtttcagccagataaattttaccggcaggctgaaggtgaagatcttccgggttatgtgtcaaatgatcttccagccattgctggtattgcggttgcgccatttcaagtgggtaacctggacgccgacagacgatcaaatgtgcattgtcgagtatcgtttcgtattcgtaccaggtcggaaaggtcagcagactatcctgaccaataataaacgccagcggcacgtccggtccttgttcctgccgccactctttcagtgtttgcgcagtgtaagagggggcattgcgctttagctcgcgttcatcaagagtaaataatggcttgtcggcaatcgccagttcaagcatgtgtttacgctgcacgctgttcgcttccggctggggacgatgcggaggaacattattagggatgattgtgacccgcgtcagaccaatcaaattcgccagcgtttccacgggttttagatgaccatagtgcaccggatcaaaggtgccgccaaacagagcctgtaaagatttcatatcaaccgtcgataaatacgtccgccaggggtttatggcacaacagaagagataacccttccagctctgcccacacactctgaccgtaatcttgtttgagggtgagttccgttcgtgtcaggagttgcacggcctgacgtaactgcgtctgacttaagcgatttaacgcctcgcccatcatgccccggcggttctgccatacccgatgcttatcaaacaacgcacgcagtggcgtatgggcagactggcgtttcaggttaaccagtaacaacagttcacgttgtaatgtgcgcaacaaaataaccggttcgctgccttccagacgcagttgctgaagaatatgcaatgcgcgcttactttttcccatcaacaaagcatcaacccaatgaaaaggggtgaaatgcgcggcatcattcaccgcctgttcaacgcgcggtaatgtcaatttgccgtctggccagagcaggcttaaacgctccagtgcctgagccagcgccagcaggttaccttcataacagtagcagagcacctgatttgccgcgtcatccagttctaagttgagctgttttgcgcgcgcagcaacccagcggggaagctgagcctgctccggtgtctgacaggtcacctgcacgctgcgattcgcaagcgcagtaaaccaggcggcattttcttgcgctttgcttaatttattaccgcggacgatcaacagcaggtcgtcatgcagaagtccggtgagtgtgagaagttgctcattgatcgccgcattcggtccgttttctggtaacaacagcaatagcgtttgtcgactggcaaacagactcatagcctggcataagctaaagatcgcattccagtcagtgttgggatcaatggaaaaagtgtggtgttcttcgaatccttgtgccgcagctacctgacgaacagcgtcctggctttcctgcaataacagaggatcgttaccaagtaaaagatacgccgcgcgcagcccttcattgagctgcgcgcggagttgttccgggtacaaccgaatcatcagttacccagcgtggtggagacgcgtgcaggcgttgccggagtatccgttgtggtgctcgtctgttcttcgtcggaacgaatatccgcagcacggatgcttggcagcttacgaatcagctgttcggcagcacggtcgtacatctcttttacgatcatgtcttgttcgttatctttcgctaacgccatttgcgggttatcgaagaagctacggaagactttggcgctaatcgggtagatatcacggccggggatcaacacggtcgcattaaccgtcatgatcatctgatactctgctgtttgaccgttacggaatacgcttgcggtatctttcgcgatgctcactttacccaaacgcaaggatggaacgtccttacgcgtggtttctttatcaagcaactcgacaccattcagacgtaactggttacgcaccgcacggcttaatggcccgttcggatcgccactgtccaggatcatgaccttcatagtggaaggaacctgcgtggtatcacgcagatgccagccacacccggcggtgattaacaccgccagagataacaacaatgttgccagatatcgcacgcttcctcccgcgcttagccaacgaccagattgaggagtttacctggtacgtaaatcactttacgtacagtaacgccatcaagatattttgctaccagatgttcctggccagcacgttcgcgaacctgttcttccgttgcgtccaccggaacggtgattttggcacggactttaccgttaacctgcaccacgaccagcgtggagtcttccaccatcgctttttcgtcagcaaccggccacggcgcgttgtcgatatcgccttcgcctttcagttcctgccacagcgtgaagcagatgtgcggggtgaacgggttaagcatacggacaacggccagcagtgcttcctgcatcagagcgcgatcctgctcgccatcggttggtgctttcgccagtttgttcatcagctccataatcgccgcaattgcggtgttgaaggtctgacgacggccgatatcatcggtcactttagcgatcgttttatgcacatcgcgacgcagcgctttctgattttcagtcagcgcatcaacgttcagtgccgcaacatcaccttttgctgtgtgctcgtaaaccagtttccagacacgtttcaggaagcggttagccccttccacaccggattcctgccattcgagagtcatatcagccggagaagcaaacatcataaacagacgaacggtgtccgcgccgtaacgttcaaccatcacctgcgggtcgataccgttgttcttgctcttggacattttgctcatgccggtataaaccagttcatggcctgccgcatctttcgctttcacgatacggcctttctcgtcacgttcaacgatagcatcaaccggggaaacccagttacgttcgccgttttcgccaacatagtagaaggcatctgccagcaccataccctgacacagcaactgtttcgctggttcgtcagagttcaccatgcctgcatcacgcatcagtttgtggaagaagcggaagtagagcaggtgcataatggcgtgttcaataccaccaatgtagatatccaccggcagccagtagttagccgcttcggaatccagcataccttctttgtactgcgggcaagtgtagcgcgcatagtaccaggaggactccataaaggtgtcgaaagtgtcggtttcacgcagtgctggcataccgttaacggtagttttcgcccactccggatctgctttaatcgggctggtaatgccgtccattaccacatcttccggcaggatcaccggcagctggtcgtccggggtcggcattacggtaccgtcttccagcgtcaccatcggaatcggcgcgccccagtaacgctgacgggaaacaccccagtcgcgcaggcggtagttcactttacgctcgccaacgcccatcgcagtcagtttatcggcgatggcgttgaaggccgcttcatggtcaagaccgttgaactcgccagagttgaacagcacgcctttttcagtcagggcttgctgagaaagatctggctcagagccgtcagctgccaggataaccggtttgatgttcaggccgtatttagaggcaaactcgtagtcgcgctggtcgtgccccggtaccgccataactgcgcccgtgccgtactccatcaatacgaagtttgctgcccaaacgggaatttcttcgcccgttaatgggtgaaccgctttaaagccagtatcgacgccttttttctccatcgtcgccatttcagcttcggcaactttggtgttacggcattcgtcaataaaggccgccagttcaggattattttccgccgctttctgcgccagcggatgacccgcagctaccgccaggtaggtacaacccataaaggtgtccgggcgggtagtgtaaacggtcagcgtgttgtcatagtcgttaacgttgaaggtgatctccacgccttcggaacgaccgatccagttacgctgcatggttttaacggtgtctggccagtgatccagtttatccagatcgttgagcagctcgtcagcgtaagcagtgattttgataaaccactgcgggatctctttacgttcaactttggtatcgcagcgccagcagcagccgtcgataacttgttcgttcgccagtacggtctggtcgttcgggcaccagttgaccgcagaagtcttcttatataccaggccttttttatacagctcggtgaagaatttctgttcccaacggtagtattccggcgtacaggttgccagctcgcggctccagtcataaccaaagcccagcattttgagctggtttttcatatacgcgatgttgtcgtacgtccacggtgccggagcggtgttgtttttcaccgccgcgccttccgcaggcagaccaaacgcgtcccagccgatcggctgcaggacgtttttgcccagcatacgctggtagcgggcgatcacgtcaccgatggtgtagttacgtacgtggcccatgtgtagtcgaccagaaggatagggaagcatagacaggcagtaatacttctctttgctctcgtcttcggttacttcaaatgtgcgcttctcatcccaatgaagctgtactttggattctatctcttccgggcggtattgctcttgcatggcagccagtggtcctgttttcaatacggctacaaatgtagcgttgaggtggtttttcagatccgcatagcatagcccaaacgtccgcgtcaaaacagcctttcgcgcactcgacgttgaaatgatgcccggattattcatacattaatttacagagtttgtgggcgtattagcaaagcaaggaacaaagaacgtctattattatagtcagttaacgacccgggagatgaaacgatgaacaaggttgctcaatattaccgtgaactggttgcgagtctgagcgaacgcctgcgcaatggcgaacgtgatatcgacgcactggtggaacaggcgcgcgagcgcgtaataaaaacaggggagttaacgcgaaccgaggtcgatgagctgacgcgagctgtcagacgtgacctggaagagttcgccatgagctatgaagagagcctgaaagaagaatctgacagcgtctttatgcgggtgattaaagaaagcttgtggcaggagctggcagacatcaccgataaaacgcagcttgaatggcgcgaagttttccaggacctcaatcatcatggggtttatcacagcggagaagtggtcgggctgggaaatctggtctgcgagaaatgtcacttccatctcccgatctacacaccggaagtgctgacgctatgcccgaaatgtggtcatgaccagttccagagacgcccgtttgagccgtaatagtctgatttcgcacagcaataaagagaatatgggccgaatgaaattccccggcccttgtttttatctttacagtaaatcttcagtctcacgaatttcctgactgacatctctggttccggaactctgaactttacgatacaggtcgagagcctgtcggagatcgacaggtcttccttctccgtagtgatacataatggccaggttataccaggcagtggcgtcattgcattcagcggctttcgtaaaccattcaaaggcagcctgataatctttctcaacgccttgtccgtgtttatacatataaccgatgttgacgtaagcgccgacgctcccctgagcggcagccttcagataccagtacatcgcttgcttatagtcctggtccaccccttcgccagcgttataatcccatgcaatttgaaactgggcgtgccgattaccctgctgtgcgcttttcaaataccagaatgcggcgagtgtcttgttttgagcaacgccttttccgtcttcataaagatcggccagattgttttgcgcgtcactatggccttgtaatgcagcttgtttgtaccagaaaaatgccagcgcatagtcttttgcgactccgttgccatttctgtacatccacccaagattattttgcgcataagacattccgctctccgcggctatctgataccagacaaccgcttctttataattgggggcttctccacgatccagtgtccagccaagggcgttggaagcgaaagtatggccttgtagggcagcttttttcagccagaagatggcttgctcattatctttatgacggcttttatcctcggtatacttttgccctaaggaatactgtgcttcacaatgaccttgctcagcggccagcttcagccagtaaaaggctttttcgtcgtccggagaatcaattgcgctatcgcgattataataaaacccaacaatatattgagcctcgcaatcgcctttttcagcacgttcgataatctcatctatacttaaattatcgcagcaactactcgtgaaaatcattatcatttccttatggttgcagataaaacatattatatttttatgtgttccatttttgcgtaagccttattttatgcgtattatgtcgcgtcagaaaagtataaataaacgagcctcgcaatgcggctaatattcatttaatgaatatttaaggataaattatatggacatggagagccaaaaaatattgtttgcactttccactccgatggaaatacgcaatgaatgctgtttacctagccatagtagtcccaaaatgtatttaggtacatgcttttttgacctttcttccagttggggaattgatgaccgtgatgacctgctgcgcacaattcaccgaatgatcgataacggtcatgccgctcggttggcagggttttatcaccgctggtttcgttatagcccatgtgaatggcgtgactatcttgctgaactaaatgagcaaggtcaggcttatgcgcaatttgtcgccagcaccgccgaatgctgtggcgaagggggaatcaaagcctgggattatgtccggatgggttttttaagccgaatgggcgtacttaataactggttgagcgaagaagaaagtctatggatccagagccgcattcatctacgggctctacgttattatagtaactggcggcaatactttgccggttatacctttggtcggcaatattggcagtctcccgaagatgatcatctgcctttattacgcgaattcttagcgcgtaaagaatacgacgattccggcaatgatatgttttatcaattatttgccagtgatgatgcgtattaccctaccttgtcctggcaaccattggcttactattctgcatgcccggaaacgcttaaggatatgagcgacctatgaaaaattgctggaagatcctcgatatagaggaaacgactgacgtcgatattatccgccgcgcttatctggcgctgttaccgtcctttcatccagaaaccgatccgcagggttttaaacaacttcgtcaggcgtatgaggaggcgctacggattgcgcagagccctgctaaatctgtttggcaaccagaagaatatgaggtagcagaacatgaaattctgctcgcctttcgtgcgttacttgcctctgatagtgaacgttttctgccctccgcctggcagcgattcattcagcaattaaattattgcagcatggaggagattgatgaattacgctggagcctgtgcacaatcgccatgaacactgcccatttatccttcgagtgcgtggtgttattagcagaaagattgcggtggttacaggaggaaaataccggggaaatagacgaagaagaactggaatcctttttatatgccattgcgaaggggaatgtttttaacttccagaccattctgcatctgcccgttgccgtgcaaaatgacaccatcgatttttaccaaatgttcgctcggatttggagtagccatccacaatggctgacattgtatttagcgcaacatcgcgcagtgattatccccgatgatgcaaaactgcacagaaatttactccgctggtatagcgcaggtcgcctggatatccccgaacttctggattacgcccagagttggcgggaaactgaacctgataatgaagatgcgccttattatgaatacgcgcaacgcgtctattgtggagaaggcgaaagcctgttggcagaactttgtgactactggcgcgagtatccctccacccaggcggatgctttaatgttgcaatggtgccgtcagcatcgggtcgattattacccattactggtgatgatgattgaagcgcgtgatctggttaacgatcagggaaaaccgctactttatgtccccggcgacagcgcccgtacgcgttttcatttatacgaaatactcagcgatgaaaaactctctgcgctggggcgtagtctggtcgagatggttttgcacaaaggacgtaagccgcggatcagtctcacgcgtgatacagaacataccttatggccattatatctagttgccaaacaattagtgcaggcctgccaacctacagaagaaagtttaatgccgattgtgagccgccttgatgcagaaaatcgttgtccactggaagcattaattattcgtcgattattaattcaggcggcgaattttaccgagaagcaaactgttgaaccggagccgcaaccgcagccaatgcccgttgacgatggtgggccaggctgtctgggcatcattaaaattattttctatatttttatctttgctggtttgatagggaaaatactccatctgttcgggtgacagtcgacgttaatgtgcgggaagcccggcaagtaatctttccgcatttttgtaatgttgtttggcggtcagttttaaccatttttgagattcataatggttaacattaataccactgccatttctgtagatcaaacctaaagtatattgagcatgagcatacccttgttcagctgcttccttataccagagaattgctttacgggtgtcgggtttgacccccagacctttgaggtagatccaccccagtttactttgcgcgcgtggattttcctgttccgcactttgctcataccagtatctcgcctgtgtataatccagtggtttaccgtcgctaccatgaagataaaattctccaaggcgatattggctcgtactgtgaccatgaatcgcggaaagctccgtggctgccgtggtgaatggaagactgcccggactgcttaaataatcaaaggcataattcaccatggctttatcacgcaacgtcgttttcttgggttggctaatacaggtaattgctgcaactataaaaattgcgaatatatacattaattttttattcatgtgtgaatgcttcgattttctttttattttgaaagcgtcaagtttatactcatcaataataaaaaagtagtcagttaatgcacttaagggattattaacaaatgaataaggaagaacaatatcttctttttgcgctttctgcgcccatggaaatacttaatcagggttgcaaacccgcgcatgacagcccaaaaatgtatactgggataaaagaattcgagctcagtagttcctggggaataaataatcgtgatgatttaattcagactatttatcagatgactgatgatggtcatgccaatgatttagctggcttatatctgacatggcatcgctcttcccctgaagagtggaaagcattaattgctggtggcagcgagagagggttgatttatacccaattcgttgcccaaaccgctatgtgctgtggggaagggggaatcaaagcctgggattatgttcgaatggggtttctgagtcgggtcggtgtgctcaacaagtggctgacggaagaagagagtttatggctgcaaagccgcgtctatgtacgagctcaccattactatcacagctggatgcactatttttccgcctatagcttaggacgtctctactggcaatcttctcagtgcgaagacaacactagcctacgcgaggcgctaaccctgtacaaatacgatagcgccgggagtcgtatgttcgaagagctggcagcgggaagcgatcgtttctatgccacgcttccctggcagccattaactgtccagtctgaatgcccggtaacgcttaaggatgtgagcgacctatgaaaacatgttggcaaatcctcgaaattgaaagcacgacgcaaatagacattatccgccaggcttatcttgctcgcttaccgttgtgtcatcccgaaaccgatccgcaagggtttaaagcattacgccaggcctatgaagaggccctgcgactggcggtaaatcctgtcgaggaagcagatgatgaagaaaaagatgctgccgctgaacatgaaatactacgtgcattcaggacattactggatagtgaaagtgatcgttttcagccttccgcctggcagaaatttattcagcaattaaatacctggaacatggaggatgtcgatcaattacgctggccgctgtgtgcaatcgccatagaagcgcgatatcttagtttaaattgtgcttctttgctggcagagcgtttgaactggcatagttttaatgacagcgaaggaatggatgaggaagaaagggaggcttttcttgaggccattcaggctggtgattgtttcgatttccttagccttctggaatatcccattgcgttgcagaaccagactgttgagtattacttcgcgctggaacgttgctgccgttaccatcctgactatgtcactgcgtttttggcgatggaaggtccgtggttaattcctgatgatgcaaagttacatcgcaaactgttgcgctggtacagcagcgtgcaaacaggtatggcggaactcattcctgtcgctcaacagtggcaaacggaagaaccagaaagcgaagatgcccggtattacttgtgtgcacaacgtttgtactgcggcgagggggaaagcctgcttgccgatctctgcgcgtactgggaaagttacccatctacacaagctgataatttgttgttgcagtggagcaagcgtcattgcccggattatttcgcgttattagtgatggttatcgaagcgcggagcatggtagatgcgcaaggtcaaccgctgaaatatgttcctggtgagagcgcccggacgcggctgttatgggcggagattttacatagcggaaaattaagcccgttaggtcaaagctttattgagagcttattcttcaagcgcaaagcatgggcgtggtggaaaagcagagtcggtagcgagacagagcaagatagtccgttcctggatttgtatcgggtagcggaacaggtagtacttgaagcgtttccgaaacaagagatgctggcccgtcttaatacaaggctggaaggcggagatgctcatccattagaggccattgtcacccggatgcttttgacgaaagtgaaactcgagccggaggatgaagatgtcgatgagccaacacctgaaaatcatgaagaaaaaaatgatgagggtgaaaaaccacagagcattaccagcattatcaaaatcagtttaacggtgctggtgataggttatgctctcggcaaaatcgcgatgttgtttagctgacgatgtgttttttgcgccgatgccggatgcagcgtttacgccgcatccggcagccgtgtttatgggatctcaatggctaaataatcgctcgcccgccgccgaacttcatccacgcgggccatatcgttactctgcaacgccgcatcaaaatcggtgatcacccggccgatctcttctcgctcgtcacccagcgcccgcgcccacaactcttccagtttggctttaaaggtgcgattgatgagcatatcgcgcggataaattttcaatgcggataaccgcgtccgactctcttcaatctgctgcgcgctcaatgttaccgggctgtggttaatcactctggacttaacgctgccgtcttccagaagcacgtcaacttcaagcaacccgttgatatcataactaaagcgaatatcaatgctctgataagccccggttttcttcaacggcacatcgaaggattccaccagaatgttgtttttaactttgtggttttctccctgatagacgttaaccgtaatactatcctgttccgggtgcatggtactataagtttctacacggctcacgggcacagtggtgtttcgttcaataatcgggctgaaaatgccggaaacgccctggcggttaacttcaacgcccaagctgtaagggcaaatatcagtgaggattacctcttcaatatcttcactgcgtaagcggcaggcggcctggattgctgcgcccagcgcgacaatggtgctcggatcgtaactttgatacggtaatttgccaaacagacgcacggcgattcgctgcaccagcggcatttgactcgcgccgccaaccagcaccagactgtcgatttgactcggcttcagacgcgcatcgcgcaacgcctgttcaatcggcactcgcaagcgattgagcagcggcaaccacaaatcttccagttcgttctcgtaaaattcgcattcccgcgtttcttcctgatactgccagcgaatgtgcaatgggctttgattgctacattttgccgcttccacacaggcgtacaaggctgccagttcactctcgttaagcgtggtcctggcgacatccgcgcgttttaaaacctcatcgaccagcatatgggtaaaatcttcgccaccaagaaagttgtcgccagcggaggcgtgaacttcaatcaccggcgtggcgtactcaagcaccgtaacgtcaaacgtgccgccaccgagatcaaacaccaggctacgggtattttgttgggtatgcaggccatacgccatcgcagctgctgtgggttcattaattaagcgtaccgcatttaacccggctaactccgctgctaaacgggtatgcttgcgttgttcatcgctgaaataagccggaacggagatcaccacatctttaatcggacgttgcagaaattcttcggcatcttcttttaaactgcgtaataccaaagaggacagttctggcgcgttaaatgtgtcgctgcctaaccgccagttggtattactgcccattgcacgtttaaataacgctgccgttttatccggatggctagtacgccgacttacagccggttttccgactaaaatatgattattttcatccatgctaattatggatggtgttaaatattcaccgaacttatttggaattaattgcgcggcaccgtctttccagacggcaattaaactattggtagtaccgagatcgataccaatggcgagttctgcattatccattgcatttatatcttgaaagaaaaagagataaacagattaagaccacccaggtaacgcgtggtgatcttaatcaatgacgtgtgttaagcgtaaaatttcagacgatcagccagtaaatcaacaaagccctgacgatcaacatcgaccattacggtggcattcggtttattgcctgtcagataataataatcaacaaccgtcataccctgggtatatttcccctgtgtttccacgccaacccagcgctcaacagaggtaaataactccggtttcaacagccaggcgatggtgcatgggtcatgcagtggtgcgccgacaaagccccatttttcgtctttatgatattcgaggaagaaatccagcagttcggcaacaatggtactaacagggttaccaatcgcgcggaaacgctcggtgtcttcaacgtggatttgtgctttatgagtaacatccagaccggccatcaccaccgggatcccactctggaagacaatttctgccgcttccgggtcaacgtaaatattaaattcagccgcaggcgtccagttacccagccccatagcgccacccataatcacgatacgggcaattttgctatgcagttccggatggctattgagcagcaaggcaacgttagtttgcggtccggtagacacaatggtgacaggttccgcactttcacgcagcgttttcgccatcagctctaccgccgtacagttttgcggtgcgaatgtcggttccggtaatgccgggccgtcgagaccgctttcgccgtgcacattgtccgcgataatcaactcacgcattaacggttttaccgcgccgcctgctaccggaatatcggtgcgattaagcaaggtcagcatacgcagaacattgcgtaaggttttttctggtgtctggtttccggcggaagacgtaattgctttgacatcaagctctggactggcgagggcgagaactattgcgatagcgtcgtcatgacctgggtcgcaatctaacagaattggcagtgccattgttgctccttgttgtgtgcttctttgcgacaagggtaacgccaggatgtaacagatacgaggggcgaaacgataaagcgtgagatggcgcgcaattgggtatgcgcgccagagtgattaatgcaggattttcgcgaggaagtcttttgcgcggtcgcttttcggatcatcgaagaaagcgtctttcgggctgtcttcgacaattttaccctcgtccataaagatcacccgattcgccactttacgggcaaagcccatttcgtgggtcaccaccatcatggtcattccttcgttcgccagttccaccatcacgtccagtacttcgttgatcatctccggatccagcgcgcttgtcggttcgtcaaacagcatcgcaataggatccatacacaacgcgcgagcgattgccacacgctgctgctgaccgccggaaagctgcgccggaaacttattggcgtgagcagaaagcccgacacgctccagcagtttcagggctttttcacgagccggcgctttatcgcgtttaagcactttcacctgcgccagggtcaggttttcgataatgctcagatgagggaacagctcgaaatgctggaataccatcccgacgcgggaacgcagctttgccagatcggttttcttgtcgttaaccacgataccatcgacggtgatttcaccttgctgcaccggttcgaggccgttgacggttttaatcagcgtacttttgccggaaccagacgggccgcaaaccaccaccacttcgccttttttcacttcggtactgcagtcggtcagcacctgaaagtgaccataccatttactaacatttttcagggtaatcattatgctgtccttcttttcaagtagctgaccaacaagctcgcgctaagactaataacgaaataaacaaatccggcaaacaggatcatctcaacctgcgtaccatcacgctcaccaatggtactggcggtacggaagaaatcggccagggataacacatacaccagactggtatcctggaacagtacgatgccctgagtgagcagcagcggcaccatcgcgcggaacgcctgcggcagaataatcagtttcatgctctgccagtgagtcattcccaacgccagcgcggcgctgctttgaccacgagaaatactttgaataccagcacggataatctcactatagtaggccgcttcaaacatgctaaacgccaccatcgcgctaattaaacggatatcattttttgggcttaatcccagcacgttttgcagaaaacccggcacgatcaggtaaaaccacagcaaaaccataactaaaggaatgctgcggaatacgttaacgtaggctttggcaaaccacgccacgggcgcaaagctggataaacgcatcaccgccagcatcgtgccccacaaaataccaatcactaccgccgtgacggtgattttcagggtgatcaccagcccgtcgagcagatatggcagggaagggacaatggaactccagtcaaactcgtacattatttgccccccatgttgccaggcaggcgaactttacgttcaaccagcgtcatcaccagcatgataaaagcgttaatcaacacatacgccagcgtaatggcggtaaagctctcccaggcatgggcactgtaatcgagcaatttacccgcctgcgccgccatatccaccagaccgatagtgctggcgatggcggagtttttcaccaggttcatcatctcactggtcatcggcgggacgataacgcgataagcattaggcagcagtacgtatcgataagcctgcggtagcgtcaggcccatcgccagcgcggcatttttttgccctcgcggcaggctctgaatcgcggcgcgtacctgttcgcaaacacgggcggcggtaaacagccccaggcagagcatggaactaaggaaaaactgaatattgggatccagctcggccttaaaccacatgccgattttctccggcagcagctccgggatcaccagataccaggtaaagaattgcacaatcaacggcacgttgcggaacagttcgacatacaacgtacccagaccagagagaaaacggtttggaacggtacgtaaaatgccgaaaaaactaccgacgaggaaagcgataatccaggcgcagatgctcaaagcgatcgtcacctgaaaaccactccagatccaaccaagataggtggtgttgccgaacggggcttgttgtaaaaaaataccccagttccagtctatagacataaatctactccagaaaaaagagggtagcagcgttaactgctaccctcgaagattgttacccagcgtattgcggttttcaggcccgatggggaacgaccatcaggcgtatagtctgtccgtgctacgtaacaatcgagagggctggaatttccgcccctggttcttgtaattagttcagtgccttgtcattcggttctttgaacagtgctttcatttcgtcactcagttcgaaattcatgttcaggtttttcggcggaattggatttttgaaccacttatcaaaccatttttccgcttcaccggaggtctgcacctgagcgatggtgtcatccatcagctttttgaactgcggatcatctttacgcaacatacaaccgtaggcctcctgagactgcggcttgccgacgatttcccagttgtctggtttcttcgctttcgcacgttcaccggccagcagagcgtcatccatcataaaggcaacggcacgaccgctttccagggtgcggaaagagtcaccgtgatctttggcgctgatgatgcgcatattcattttttgctcttcattcagtttgttgagcaaaacttcagaggtagtgccggaagtgacgactacggctttgtctttcaggttggcaaaatctttgatatcgccaccctttttggtcaacaggcgcgtaccgaccacgaaaatagtgtcagagaaagccgcctgtttttggcgttcgacgttgttggtggtagaaccacattcaaaatcgaaagtgccgttttgcagcagtggaatacggttttgactggtaatcggaatcagttttacctgcaagtccggtttgttgagtttctttttcactgcttcaacaatggcgttggagtaatcctggctgtaacccaccactttttgctgattgtcgtaataagagaaaggcacactagattcacggtgaccgacgacaatcacaccgtttttggcgattttgtccagagtactgcccgctgccggggcggcgtcatctgcctgtgccagtcctgcggaaagcgccagggcgaggattgctgtggcaggtttacgtaattgcatatccaactcctttatcttctgcgttaagaacgcatggatacccgttgtgagtgtttgtgttgttatcgtctgcaactttattgtgcagtgttgtgcctgttagggaaggtgccttaggtaacatttagtttggctaaatgtaaagatattgctgttttattgtttgtttttgcgagatgcgccgcaccattccgaagcaaaattcttaaaatgcactcttttagtgctaccgctggattactgtggtgcaactaggttgtactgatgctgtttcagggtttgccttgtataacaaagcaatagatgtgccaaagttggataggagaatattgttatccggataatgcactgatgccgcatccggtgagcgtgccgaaatatgggatgtattccggcacgataagaagggattatttacgtcgctgacgcagactcatcaacacagcagcaaaaccaaacaatgccgtcagcacccacagcggccagttgccggtacgtgcgtatggtgtgagtccggtggtcggcgtcacgttagtggttaacacctcgcgggtgaactgcgggatcatcgcctgaatctcaccctgcgggccaatcaccgccgtaatgccgttgttggtgctgcgcaacagtgggcgcgccagctccagcgcacgcattcgcgccatctggaagtgttgccatggaccaatagatttaccaaaccacgcatcgttggagatagtcagcagatagtcggtatccgggcggaagttatcgcgcacttgctcgccgagaatgatctcgtagcaaatagccgcagtaagctcaataccatttgcgctcagcggcggctggatatatggcccacggctgaagctgctcatcggcagatcaaagaacggtgctaacggacgcagaatgctctccagcgggacaaactcgccaaacggcaccagatggtttttgttatagcgatcggcactttcgtagctgtacggcgcacctttacccagcgtgatgatggtgttgtaggtatcgtagcggttctgcttattgagacgcgcgtcgacaatcccggttaccaggctgctacctttatcacgcaactcaccgtccagtgctttgaggaacggttgctgattaatttccagatcggttatcgcgctctccggccagataatcaagctacttttgcccatcagcggtgccgttgcgttgtagtaaatcttcagcgtattaagaagctggccttcgtcccatttcaggctttgcggaatatcgccctgaaccatgctaacctgaatggttttctccggttgtggggtaaaccactggatgtaacgcagcgggaagggaagggcaaacagcacgacggccaccaccagcggacgccagttgcgtttgaccaacgccagtgccagcaggccactaaccatcatcagcaggaagttaatggcttccacgcccattatcggtgccagcccttttaacgggccatcaatctggctatagccgaactgtaaccacgggaagccggtcagtacccaaccgcgcagaaactcggtcacttgccagagggcaggggcggcaatcgctacgcgcagccaggtggttttcggccacagacggctcagcacgccagcaaacagtccggtatacaggctcaaatacgccgccagcagcaccaccaggaagatgttaaccgggccaggcattccgccaaaggtcgcgatgctgacatagacccagttaataccgctgccaaagaggccaaatccccagcaaaagccaatagcggcagactggagtggacggcggttaaaggtcaacgcctgaagccccatcaggctaataatcgccgcaggccagacgtcgtaaggagagaaggccagcgttccgcaggcaccgaataataacgccagcagcaggcgaatgcgctggcgttcaattaaactggcaaaagccatgtagttatctatccagtttcggttttattcatccagcttcggctggggactgtcatccgggattttgacatgaacctgaataatacgccgactgtcggccatcgccactttgaactggtaaccgtcgatgtcgatagtttcgccacgcgccggaagatgcccaaatgcctgcatcaccagaccaccgatagtgtcgacttcttcatcgctaaagtgggtgccgaacgcttcgttgaagtcttcaatggaagccagtgcgcgtacggtccaggtatgacgactcagctgacggaagtcgatatcatcttcttcgtcatactcgtcttcaatctcaccaacaatcagttccaggatgtcttcaatggtcaccagaccggaaaccccaccgaattcgtcaataacgatcgccatgtggtaacgctgagagcgaaactctttcagcatccggtctacgcgcttactttcaggaacgacaaccgcctgacgtaacactttgtccatgctgaaggcttcagcatcgctgcgcataaacggcagcaagtctttcgccatcagaatcccttcaatgtgatctttgtcttcgctaatcaccgggaaacgactgtgggcggactcgatgatgacatcaagacattcgtccagcgtctggttgcgtttcagggtaatcatctgggagcgggggatcatgatgtcgcgaacgcgttggtctgcgatgtccatcaccccttcgagcatatcgcgcgtatcttcgtcgataaggtcgttctgcccggaatcacggatcagcgccagcagttcgtcacggtttttcggttcaccgtggaaaagttggctgagtaacagggagaaaaatcccttcttgttgcttatcgtgtcactactgtgactattgtcgtcgctcatggcgtcgtatgggttctcatgttagttaatcaaaacgccgtcgttaatcaccaacggcggggacgtctgccagtcaaatgcctggcaaattattctttctcggcaatgtacggatcctcatagcccagagcaagcataatctctgtttcgagggcttccatttcttctgcttcgtcatcttcgatgtgatcgtaacctaacaaatgcagactgccgtgcaccaccatatgcgcccagtgcgcctccagtggtttgccttgctcctgagcttccttctcaaccacctgacggcagataaccagatcgcccagtaggctcatttccatgccaggcggcacttcaaacgggaaggagagcacgttggtcggcttatccttaccgcgataggtcagattcagactgtggctttcggcggtatcgaccacgcgaatcgtcacttcgctttcttcctgaaactgcgggatcaccgcattcagccatgtctgaaactggctctcttccggtaacccggaattatcttcacatgccagttgtaaatcgaggatcacctgactcatttttgttcctgttcttcgcgcttgcgttctgctgccagcgccgcttttcgtttttgttcggcttcttcccaggcttcataggcgttaacgatacgcgccaccacagggtgacgaaccacgtcttcgctgtggaagaagttaaagctgatctcttcgacatcggccagcacttcgatggcgtgacgtaagccacttttagtattacgcggcaggtcgatctgtgtgacgtcgccggtgataaccgctttactgttaaaaccgatacgggtcaggaacatcttcatctgttcgatggtggtgttctggctctcatcgagaatgataaacgcgtcgttcagcgtacgaccacgcatataggccagcggtgcgacttcaataacgttgcgctcaatcagtttctcgactttctcaaagcccagcatttcaaacagcgcgtcgtacagcgggcgcagatacgggtctactttctggcttaaatcgccaggcaggaagcccagtttctcaccggcttctactgccggacgagtcagcagaatacggcgaatttcctgacgctccagggcatcaactgccgcagccactgccaggtaggttttacccgtacccgccgggccaacgccgaaggtaatgtcatggtcgagaatattggcgatgtactgcgcctggtttggcgtgcgcggcttaattacgccgcgtttggttttgatattgaccgctttgccgtactccggcacgctctccgcgctttgctccagtacccgcgcttctttaatcgcaaggtggatctgttccggttcgatatcctgaatctgaccgcgcatcggggcagtatcgacatacaggctacgcagaatgtctgccgcagcggtgacgcaaatcggacggccggtcagtttaaagtggttatcgcggcgattgatctcgatgccgagacggcgttcgagctgcttgatgttgtcatcaaacgggccgcacaggctcaacagacgcgcattgtctgctggctccagggtgatttcgcgagtgtctatgttcaaaccgttcctcttatctgtatgccgccggaagctgaacattcaccggcctataaggaaattattcacgccacaggaaaaaggcgcaagcattgcaataaagatggggataaagagagaaaaaacaaggcccaccggaacggcaggcctgagaattacggctgataataacccacgccaaggtcgttttctttgcgggtacgggcaatcacactttccggtgtttctgccacgcgcagacccatttcatcttcagtacgcaccactttaccgcgcagagagttcgggtagacgtcggtaatttctacatcgacgaatttaccgatcatatccggcgtgccttcgaagttgaccacgcggttattttccgtacgcccggaaagctccatgatgctcttacggcttgtaccttctaccagaatacgctgggtggtgccgagcatccggcggctccacgccatcgcttgctgattaatgcgctcttgcagaatatacagacgctgcttcttctcttcttccggaacatcatcaaccatatcggcggctggtgtacccggacgtgcagagaagataaagctgtagctcatgtcgaaattgacgtcggcaatcagcttcatcgttttctcgaagtcttcggtggtttcgccagggaagccaacgatgaaatcagaactgatctgaatatctggacgcgccgcacgcagtttacggatgatcgctttgtactccagcgccgtatgggtacggcccatcaggttcagaatgcgatcggaaccgctctgtaccggcagatgcaggaagctcaccagctccggcgtgtcgcgatacacttcgatgatatcgtcggtgaattcgatcggatggctggtggtaaagcgaatacgatcgatcccgtcgatcgcagcaaccagacgcagcagatcggcaaagcttccggtggtgccgtcgtagttttcaccacgccaggcgttcacgttctgaccgagcaggttgacttcacgcacgccctgagccgcaagctgggcaatctcaaacagaatatcgtcggacggacggcttacctcttcaccacgggtgtaaggcaccacgcagtaggtgcaatatttattgcagccttccatgatggagacaaacgcggtcggcccttcggcgcgcggttccggtagacggtcaaacttctcgatttccgggaagctgatatctacaaccgggctgcggtcgccacgcacggagttgatcatctccggcagacggtgcagcgtttgcggcccaaaaataatatcgacatagtgggcgcgctggcgaatgtgctcgccttcttggcttgccacgcagccaccgacgccgataatcaggtctggattcttctcttttaacagtttccagcgacccaactgatggaagactttttcctgagccttctcgcggatactgcaggtgttcagcagcagcacatccgcttcttccgccacgtcggtcagttgatagccgtgggtggcatccagcagatcggccatcttgctactatcgtactcgttcatctgacagccccaggttttaatatggagttttttggtcatcgacttgctcttgcgaaatagtagccaggaatgcagggcgcatagtgtaatgctttgctgccgttgtgaccagtatgagcgttatcagcccttaggggtaaaaatcctgtaaacttaaagcatattgctaacaggatgattgaccatgacaaatcaaccaacggaaattgccattgtcggcggaggaatggtcggcggcgcactggcgctggggctggcacagcacggatttgcggtaacggtgatcgagcacgcagaaccagcgccgtttgtcgctgatagccaaccggacgtgcggatcagcgcgatcagcgcggctagcgtaagtttgcttaaagggttaggggtctgggatgcagtacaggctatgcgttgccatccttaccgcagactggaaacgtgggagtgggaaacggcgcatgtggtgtttgacgccgctgaacttaagctaccgctgcttggctatatggtggaaaacactgtcctgcaacaggcgttgtggcaggcgctggaagcgcatccgaaagtaacgttacgtgtgccaggcagcctgattgcgctgcatcgccatgatgatcttcaggagctggagctgaaaggcggtgaagtgattcgcgcgaagctggtgattggtgccgacggcgcaaatagccaggtgcggcagatggcgggaattggcgttcatgcatggcagtatgcgcagagctgcatgttgattagcgtccagtgcgagaacgatcccggcgacagcacctggcagcaatttactccggacggaccgcgtgcgtttctgccgttgtttgataactgggcaagcctggtgtggtatgactctccggcgcgtattcgccagttgcagaatatgaatatggcacagctccaggcggaaatcgcgaagcatttcccgagccgtctgggttacgttacaccgcttgccgctggtgcgtttccgctgacgcgtcgccatgcgttgcagtacgtgcagccagggcttgcgctggtgggcgatgccgcgcataccatccatccgctggcggggcagggagtgaatcttggttatcgtgatgtcgatgccctgattgatgttctggtcaacgcccgcagctacggcgaagcgtgggccagttatcctgtcctcaagcgttaccagatgcggcgcatggcggataacttcattatgcaaagcggtatggatctgttttatgccggattcagcaataatctgccaccactgcgttttatgcgtaatctcgggttaatggcggcggagcgtgctggcgtgttgaaacgtcaggcgctgaaatatgcgttagggttgtaaccttacaacattgccggatgcgtgccaaccgtaggtcggataagacgcggcagcgtcgcatccgacattgaaggataagacgtgtcaacatcgcattcgacattgaatgaacgcagaaaagcaaaaagctcgccgaagcgagcttttttaatgtggctggggtacgaggattcgaacctcggaatgccggaatcagaatccggtgccttaccgcttggcgataccccaactgggtgcacttacaaggtaagcgtcttgaataaattggctggggtacgaggattcgaacctcggaatgccggaatcagaatccggtgccttaccgcttggcgataccccaacaaattggttttgaatttgccgaacatattcgatacattcagaatttggtggctacgacgggattcgaacctgtgaccccatcattatgagtgatgtgctctaaccaactgagctacgtagccagattgtttcttcgatggctggggtacctggattcgaaccagggaatgccggtatcaaaaaccggtgccttaccgcttggcgataccccaataaccgggcggtgaaccgcttactcgaagaagatggctggggtacctggattcgaaccagggaatgccggtatcaaaaaccggtgccttaccgcttggcgataccccatccgtacaacgctttctggtgaatggtgcgggaggcgagacttgaactcgcacaccttgcggcgccagaacctaaatctggtgcgtctaccaatttcgccactcccgcaaaaaaagatggtggctacgacgggattcgaacctgtgaccccatcattatgagtgatgtgctctaaccaactgagctacgtagccatcttttttttcgcgataccttatcggcgttgcggggcgcattatgcgtatagagccttgcagcgtcaacctctttttcaaggaaaattgctcgaaagtgactgtttggttaggttgcgaacagcgtggcgctatattcgtcaattattgtttactttgtgttttttcccaccctacagccattcttttgtcatacaggatgaaattcggaatttaacaatagtggtgggaaattaatctatgaaatactggcctacagtgatgagttgtcaaacagtgatgtggcaaacccggaacatttccttactgcatatcagaatcaacaagcacctcaataactgaaacagccccggatttcaccggggctgtttcgcatttcttacttatacgcgctctggtgaacaccaaccgcgcgaccagacggatcgtccattttcttgaacgcttcatcccattcgatcgctttagcggaagaacaagcgacggaaggaccgcccggcacgcactcagcggcgctcggaagcgggaatagttcttcaaagatctcccgatacaagtacgcttctttagaggttggcgtgttgtacgggaagcggaagcgggcagtttccagttgctgatcagaaacctgctgcgcagccacttctttcagggtgtcgatccaactgtaaccgacgccatcggagaactgctctttctgccgccaggccacgcttgcaggcagatacgcttcaaaacattcacgcaggatgtgtttttccattttgccgttaccgcacattttatcctgtgggttaatacgcatcgccacatcaaggaattttttgtcgaggaacggaacgcgtgcttccacgccccaggcactcatcgctttgttggcacgcgcgcagtcatacatatgcagggccagcagtttacgcaccgtctcttcatgcagttctttggcattcggtgctttgtggaagtaaagataaccgccgaacacttcatcagaaccttcaccggacagcaccattttaatgcccatcgccttgatcttacggctcattaaatacatcggtgtactagcgcgaatagtggtcacatcataagtttcgatgtggtaaatcacgtcgcggatggcatccagaccttcctgtacagtgaagtgaatttcgtgatgcaccgtgcccagatggtttgccacttcctgggctgctttcagatccggactacccggcagacctacagcaaaggagtgtaactgcggccaccaggcttcagagcgttcctgatcttccacgcgacgggctgcgtatttcttggtgatagcggaaataatactggaatccagaccaccagaaagcagcacaccgtaaggcacatcagacatcagatggcttttaacactatcttccagtgcctgacgcagctcgtttttgtcggtcacgttatctttcaccgcatcgtagtcgaaccagtcgcgatgatagtaagaacggatttcgccgtcctggctccacaaatagctccccgccgggaactctttaatcgtgcggcaaactggcaccagcgctttcatttcactggccacatacagctgaccgtgttcgtcataccccatatacagtgggatgatccccagatggtcgcgaccaatcaggtaggcatctttttcgctgtcgtacagtgcaaaggcaaacatgccctgcaagtcgtcgagaaattccggccctttttcctgatacagcgcgaggatcacttcacagtcagacccggtctggaactggtaacgatcgccatattcggcgcgcaatgcctggtggttgtagatttcaccgtttaccgccagtacgtgggttttttgttggttgtagagaggttgcgcccccgcgttaacgtcaacaatactcagacgttcgtgggcgagaatggcgttatcgctggcataaataccggaccagtccgggccacgatgacgcatcaggcgactcagctcgagggctttcttacgcagctcaactgcgtctgttttgatatcgaatacgccaaaaatactacacataaccttctccgttaacctggtatttgttgcttgttgtgtttgcttgtttaaaaaaatgccgcaaagcagcactgtgcgcaagcgatttggcggtgaaaaaataaaaaacgtaatggtgattgtcgattggtgaaaaaaggtctggtgtgaggatatatttattgatgaatcgataatttttagcgggttttattgaatgtttatattttacgggggccaaattgctgacaaagtgcgatttgttcatgccggatgcggcgtgaacgccttatccggcctacaaaagcatgaaaattcaatatattgcaggagctgcgtaggcctgataagcgtagcgcatcaggcagtttggcgtttgtcatcagagccaaccacgtccgcagacgtggttgctattcagataacgtcgatttcagcgacactcgggtaaatccagctggggcggaaaggcatactgtcgatatcgtcgaggctgctaacaccagaaagcaccagaatcgtctccagacctgcctggaagccggccagaatatcggtacgcaggttatcgccgacaatcaccgtttcttcgctatgcgcctgcattttgtttaatgctgcgcggatgatccacgggctgggcttaccaacatagaacggtttgcgcccggagattttctcaatccctgcacacaacgcgccacaagcgggataaaaaccgcgcccgtgggtgtccggattggtggcgataaaacgtgcaccgttagcgacgaaataggctgctttatgcatcatgtcccagttgtaggaacgcgtttcgccaacaatcacgaaatcagggttcacatcggtaatagtgaaaccggctttgtacagttcatgaatcagtgcgccttcgcccaccacatacgctttcttgccttcctggcgacgcaggaaatcggcagtcgccatcgcagaggtataaaacacgctgtcaggtacatcgacacctgcggtggcaaagcggttcgccagatcttgcccagtctggctaggatagttggtcagcaacaccagcggcaggcctttatccataatcccgtgcaaaaattccgctgcacccggtacggcgacgttatcgtgcatcagcacgccgtcgatatcgcaaattacatttttaatggtcatggactacccagaatattgacaacaataagcgccactataaaagcacattaattttccagcaaatgctggagcaaaataccgttgagcatggcgcgttttaccagcgcaaaagcgccgattgcgctgcggtgatccagctcagaacgtaccaccggcagattagtgcgaaacgccttcagcgcctgggtattaatgcagctttcaatagcagggagcagcactttatcggcttcggtgatttcaccggcaataacaattttttgcggattaaataagttgatagcaatggcgatggttttacccagatgacgaccgacatactcaattacttcgctcgccagactatcgcctttgttcgcggctttgcagatagttttgatggtgcagtcgtccagcggcacgcggctctggtagccctgctttaacagattcaacacccgttgttcaatggcagcgttggcagcgatagtttccaggcagccaaagttgccgcagtggcagcgttcacccagcggttcgacctgaatatggccaatttcaccgacgttgccgttgcggccaataaaaatgcgcccgttagagataatcccggccccggttccgcgatggacacgcaccagaatggagtcttcgcaatcctgacttgcaccgaagtagtgctccgccagcgccagactacggatatcgtgaccaacgaaacaggtcactttaaaacgttcttccagagcttctaccagcccccagttttctacctgaatatgcggcatgtaatgaattttgccgctgtccgggtcaacaagccctggcaggatcacgctaatcgcgatcagctcgcgcagtttgcgctggtagctatcaataaactgagcaatggcattcaacagggcatgttccagcgtttgctgggtacgttccggcagcgggtaatgttcttctgccagcactttgctgctgagatcaaacagagtgatggtggcgtcatgacgaccaagccgtacgccgattgcgtggaaattgcgggtttcggtgacgatggagatagcgcggcggcccccggtggaggcctgctgatcaacttctttgatcagcccgcgttcgataagctgacgcgtaattttggttacgctggcgggggcaagctggctttgctcggcaatctgaatccggctgattggcccgtactggtcaatcaggcgataaaccgccgcgctgttaagctgttttacgagatcaacattacctatctgagcttgtccgcctggtgtcatactttctcttattgagttacgacctcgttaccgttaacgatggtcttggtgattttaaaatcaggtgtgaatgcagtcaggttggctactttacctgcggcgagtgtgccgagacgtttctcaacgccaatcgcacgcgccggatagagcgtcgccatacgtagcacttcatccagtgcgataccgcaatgttcgaccagattacgcacgccttcaatcatggttaaggaactaccgcttaacgtaccgttctcatccacacaaagtccgttacggtagtatattgttttacccgcaaaaatgaactgttcaatgttggcacctgctggcgcggtggcgtcagtaaccagacacagtttgtcgcctttcagacgtttagcgttgcgaatgttggcgtaatcaacatgcaggccatcagcaataataccgcaataaatgtcagcttcgtcgaggatcgcgcccgccaggccaggttcacgaccggtaatatacggcatcgcgttgtacagatgggtggcaaaggtaatccccgcgcggaaaccggcttttgcttctttcaacgtcgcgttggagtgaccggcagaaaccacaatcccggcatttgccagtttgctgatgacttccgcaggaaccatttccggtgccagggtcactttggtaatgacgtcggcgttttcacacaggaaatcgaccagcgcggcatcaggcttacgcacaaaattcggattatggatgcctttttttaccagattcagccacggaccttccagatgcagacctaacgcctgattcggatgttttgccaggtactcgcgcataacgcgcacgccctgtttcatcagctcatcgctggtggtgataagcgtcggcagatagttagtacagccacttttctcattggctttctgcatgatttccagcgtttccacgctgaccgcttcagcggtgtcgttaaactgtacgccgccgcagccgtttaactgcacatcgataaaaccgggggagagaatggccccgttcagactacgttgttcgatctctggcggcagttccgctaccggacagacgcttttaatcaggccatcagcgataacaaccgcgtggtcatcaagaaattcgtggccggtaaagatccggccctgggttaatgcatacattctgacccccgattttaaaaaatattgccctgagcaaggagccagggcagggataacaattacagacctttgatattttctgcttctaattcattgaaatatcttaaagtcttaactttcagctccatggtggaaggttcatcgcacaccatgatcgctttcggatgcagttgcagacagctgatggtccacatatggttcacgcaaccttcaacggcggcctgcagcgccagtgctttctggctacccagcaccagaatcatcacttcttcggcatccagcagtgtaccaacaccgacagtcagggcatattttggcacctgattaacatcgttatcaaagaaacgagagtttgcgacgcgagtgtcatgagtcagggttttgatacgagtacgagaagccagagaagacgccggttcgttaaatgcaatatgaccgtcgttacctacaccgcccataaacagatgaatttttccgtaagaacggattttttcttcatactggcggcactcggcgtcgatatccggggcgttgccgttgagaaggttgatgttttctgctggaatatcaacgtgatcgaagaaattacggtgcataaagctgtagtagctttccggatgctctttcggcagaccgacatattcgtccatgttgaaggtgacaacgtgcttaaagctgacctggcctgctttatgcatttcgactaacgctttataggtggtcatcggcgtgccgccagtcggcaggcccagtacaaacggacgatcggcagtcggtttgaacgcattgatacgattgacgatatggcgagcagcccatttgccgacctgttcagcggtagtcagggggatcagtctcattattcacctcaataagtaaaatgtaagccgttggcggattaggcatctttaagcgtaacctggatttgcgcagacaggcgtcaatccgacctgattttttgaatgataaaataagttttctggtttagccagtaaaagggagtgataataacgatatttggtgacaaaactcacaaaagacacgcgtttaatttgcgatacgaattaaattttcacacactctgtagcagatgatctaacaatctgattacagaacatcggcagtacaatttgcagcaaaataaaaatacggcttgaaacgagccaaatagggttctcgtagggggaataagatgaatattttaggttttttccagcgactcggtagggcgttacagctccctatcgcggtgctgccggtggcggcactgttgctgcgattcggtcagccagatttacttaacgttgcgtttattgcccaggcgggcggtgcgatttttgataacctcgcattaatcttcgccatcggtgtggcatccagctggagcaaagacagcgctggtgcggcggcgctggcgggtgcggtaggttactttgtgttaaccaaagcgatggtgaccatcaacccagaaattaacatgggtgtactggcgggtatcattaccggtctggttggtggcgcagcctataaccgttggtccgatattaaactgccggacttcctgagcttcttcggcggcaaacgctttgtgccgattgccaccggattcttctgcctggtgctggcggccatttttggttacgtctggccgccggtacagcacgctatccatgcaggcggcgagtggatcgtttctgcgggcgcgctgggttccggtatctttggtttcatcaaccgtctgctgatcccaaccggtctgcatcaggtactgaacaccatcgcctggttccagattggtgaattcaccaacgcggcgggtacggttttccacggtgacattaaccgcttctatgccggtgacggcaccgcggggatgttcatgtccggcttcttcccgatcatgatgttcggtctgccgggtgcggcgctggcgatgtacttcgcagcaccgaaagagcgtcgtccgatggttggcggtatgctgctttctgttgctgttactgcgttcctgaccggtgtgactgagccgctggaattcctgttcatgttccttgctccgctgctgtacctcctgcacgcactgctgaccggtatcagcctgtttgtggcaacgctgctgggtatccacgcgggcttctctttctctgcgggggctatcgactacgcgttgatgtataacctgccggccgccagccagaacgtctggatgctgctggtgatgggcgttatcttcttcgctatctacttcgtggtgttcagtttggttatccgcatgttcaacctgaaaacgccgggtcgtgaagataaagaagacgagatcgttactgaagaagccaacagcaacactgaagaaggtctgactcaactggcaaccaactatattgctgcggttggcggcactgacaacctgaaagcgattgacgcctgtatcacccgtctgcgccttacagtggctgactctgcccgcgttaacgatacgatgtgtaaacgtctgggtgcttctggggtagtgaaactgaacaaacagactattcaggtgattgttggcgcgaaagcagaatccatcggcgatgcgatgaagaaagtcgttgcccgtggtccggtagccgctgcgagtgctgaagcaactccggcaactgccgcgcctgtagcaaaaccgcaggctgtaccaaacgcggtatctatcgcggagctggtaagcccgattaccggtgatgtcgtggcactggatcaggttcctgacgaagcattcgccagcaaagcggtgggtgacggtgtggcggtgaaaccgacagataaaatcgtcgtaagtccagccgcagggacaatcgtgaaaatcttcaacaccaaccacgcgttctgcctggaaaccgaaaaaggcgcggagatcgtcgtccatatgggtatcgacaccgtagcgctggaaggtaaaggctttaaacgtctggtggaagagggtgcgcaggtaagcgcagggcaaccgattctggaaatggatctggattacctgaacgctaacgcccgcagcatgattagcccggtggtttgcagcaatatcgacgatttcagtggcttgatcattaaagctcagggccatattgtggcgggtcaaacaccgctgtatgaaatcaaaaagtaatctgctttatgcctgatgcgacgcttgagcgtcgcatccaacaatgacaagcggtggagatcttctctgccgctttttttttcatcaatcatccccataatccttgttagattatcaattttaaaaaactaacagttgtcagcctgtcccgcttataagatcatacgccgttatacgttgtttacgctttgaggaatccacgatgagtgaggcagaagcccgcccgactaactttatccgtcagatcatcgatgaagatctggccagtggtaagcacaccacagtacacacccgtttcccgccggagccgaatggctatctgcatattggccatgcgaaatctatctgcctgaacttcgggatcgcccaggactataaaggccagtgcaacctgcgtttcgacgacactaacccggtaaaagaagatatcgagtatgttgagagcatcaaaaacgacgtagagtggttaggttttcactggtctggtaacgtccgttactcctccgattattttgatcagctccacgcctatgcgatcgaactgatcaataaaggcctggcgtacgttgatgaactgacgccggaacagatccgcgaataccgcggcaccctgacgcaaccgggtaaaaacagcccgtaccgcgaccgcagcgttgaagagaacctggcgctgttcgaaaaaatgcgtgccggtggttttgaagaaggtaaagcctgcctgcgtgcgaaaatcgacatggctagtccgtttatcgtgatgcgcgatccggtgctgtaccgtattaaatttgctgaacaccaccagactggcaacaagtggtgcatctacccgatgtacgacttcacccactgcatcagcgatgccctggaaggtattacgcactctctgtgtacgcttgagttccaggacaaccgtcgtctgtacgactgggtactggacaacatcacgattcctgttcacccgcgccagtatgagttcagccgcctgaatctggaatacaccgtgatgtccaagcgtaagttgaacctgctggtgaccgacaagcacgttgaaggctgggatgacccgcgtatgccgaccatttccggtctgcgtcgtcgtggttacactgcggcttctattcgtgagttctgcaaacgcatcggcgtgaccaagcaggacaacaccattgagatggcgagcctggaatcctgcatccgtgaagatctcaacgaaaatgcgccgcgcgcaatggcggttatcgatccggtgaaactggttatcgaaaactatcagggcgaaggcgaaatggttaccatgccgaaccatccgaacaaaccggaaatgggcagccgtcaggtgccgtttagcggtgagatttggattgatcgcgccgatttccgcgaagaagctaacaagcagtacaaacgtctggtgctgggtaaagaagtgcgtctgcgtaatgcttatgtgattaaggcagaacgcgtcgagaaagatgccgaaggtaatatcaccaccatcttctgtacttatgacgccgataccttaagcaaagatccggcagatggtcgtaaagtcaaaggtgttattcactgggtgagcgcggcacatgcgctgccggttgaaatccgtttgtatgaccgtctgttcagcgtgcctaacccaggtgctgcggatgatttcctgagcgtgattaacccggaaagcctggtgatcaaacagggctttgctgaaccgagcctgaaagatgcggttgcgggtaaagcattccagtttgagcgtgaaggttacttctgcctcgatagccgccattctacggcggaaaaaccggtatttaaccgcaccgttgggctgcgtgatacctgggcgaaagtaggcgagtaattttaagtttcgctatgccggatggggcgtttacgtcgcatccggcaaggaacagacaaacagtttcaaacgctaaattgcctgatgcgctacgcttatcaggcctacatgatctctgcaatatattgagtttgcgtgcttttgtaggccggataaggcgttcacgccgcatccggcaagaaacagcaaacaatccaaaacgccgcgttcagcggcgttttttctgcttttcttcgcgaattaattccgcttcgcaatttatccataaaataaatttaaaataacaaaacataattaaataaaatgtaaccgctttcatcttgctggaatttcacgcttttattcttctgcaagcctttcaaccgcaaacttaagccttgtaacaaaaatcatcaaaatatgtgcggttgctcatgttcttacattctggttacagaaagagattgataattcgcgtcgcgaaaaatagtctgttcctgtagtcagcgagacttttctcaacgctacttttttaatttttattttttcgctgttcacctttggtgcagcaatttatacgtcaaagaggattaacccatgcgtacgtttagtggcaaacgtagtacgctggcgctggctatcgccggtgttacagcaatgagcggctttatggcaatgccggaggctcgcgccgaaggattcatcgacgatagtaccttaaccggcggtatctattactggcagcgtgaacgcgaccgtaaagatgttaccgacggcgacaaatacaaaaccaacctttctcactccacctggaatgccaacctcgattttcagtccggttatgctgctgatatgttcggccttgatattgctgcgtttacggcgattgaaatggcggaaaacggcgacagctcccacccgaacgaaatcgcgtttagtaaaagtaataaagcctatgacgaagactggtccggcgacaaaagcggtataagcctgtataaagctgcggccaaatttaaatacggtccggtttgggcgagggcaggttacattcagccaactggtcaaacgctgttagcgccgcactggagctttatgccaggtacttatcagggggcggaagccggggcgaattttgattacggcgatgctggtgcgttgagtttctcctacatgtggaccaacgaatacaaagcgccgtggcatctggaaatggatgagttttatcagaacgataaaaccaccaaagttgattatctgcactcctttggggcgaaatacgacttcaaaaataacttcgtactggaagcggcatttggtcaggcggaagggtatatcgatcaatattttgccaaagccagctacaaatttgatatcgccggtagcccgttaaccaccagctaccagttctacggtacccgagataaagttgacgatcgcagcgtcaacgacctttatgacggcaccgcctggctgcaagcgttgacctttggttaccgggcggctgacgtagtggatttgcgcctcgaaggcacctgggttaaggctgacggtcagcagggatacttcctgcaacgtatgactccaacctacgcttccagtaacggtcgcctggatatctggtgggataaccgttctgacttcaacgccaacggcgaaaaagcggtcttcttcggtgcgatgtatgacctgaaaaactggaatcttccaggcttcgccatcggcgcttcctacgtttacgcatgggatgctaaacctgcgacctggcagagcaatccggatgcgtactacgacaaaaaccggactattgaagagtctgcctacagcctggatgcggtctataccattcaggacggtcgcgccaaaggcacgatgttcaaactgcatttcaccgaatacgacaaccactccgacatcccaagctggggcggtggttacggcaacatcttccaggatgagcgtgacgtgaaatttatggtaatcgcaccattcaccatcttctgatgcccgacgcggcaggttttgtgcctgccgcacgtttgaggaatttgctatgaaaaaactgattctcatcgccataatggcaagcgggctggtagcttgtgcgcaaagtaccgcgccacaggaagacagtcgtctgaaagaggcatacagcgcctgtatcaacaccgcacaaggtagcccagaaaaaattgaagcctgccagagcgtgttaaacgtgctgaagaaagagaaacaacatcagcagtttgccgaccaggaaagtgtacgcgtactggattatcagcagtgtctgcgtgcaacgcaaaccggaaatgatcaggcggtgaaagccgattgtgataaagtctggcaggaaatacgcagtaataacaaataagtgagagctgtaactctcgcttttcttatttcccttgcataaaaaagccaacccgcaggttggcttttctcgttcaggctggcttatttgccttcgtgcgcatgttcatcttcgcggcaatcgccttcggcacagtgaccgtaaagatagagactgtggttagtcaggcgaatgccatgttttgcggcaatttcacgctgacgcgcttcgatggaatcatcactaaattcgataaccttgccgcagtcgaggcagatcaggtgatcgtggtgatgttgctgtgtcagttcaaatacggatttaccgccttcaaaattgtggcgggtgacgataccagcgtcgtcaaactggttcagtacgcgatataccgtagccagaccaatttcttcacccatatcgatcagacgtttgtataaatcttccgcactgacgtgatggttgtccggctcctgaagaacttccaggatttttaaacgaggaagcgttactttcaggccagctttctttagggcggtattgttatcagtcatgcggaatctgtcctgttactaagcggttcacttcattagaagaagtgacagaatttgctcttgagataatgcgtatcattatagaattgccacgcctaaatgaaaaccacaagtccctggcaaatattgttaataaaaacgtggcacagcttacatttacaacggcaaggccacttgaacaccgggacattgtacaggtacaacagcaaaagttacaaatttgtagcaattattttgattggcattatctattaatacggcgtagacatgagtctacgccgcatcacatcaggcattgagaatttcgtcgagatgcaactcttcagaaatctgtttaacccatttttctacacgttcagcggtcagttccggctgacggtcttcgtcgatagccagaccgacaaagtggtcgtcatctgccagacctttacttgcttcgaaatgatagcccgcagttggccagtgaccaacgatggttgcaccgcgcggttcaatgatgtcgcggatggtgcccaatgcgtcgcagaaatattcggcgtaatcttcctggtcaccacaaccaaacagcgcaaccagtttgccgttgaaatcaatctcttcgagagtcgggaagaagtcatcccagtcacactgcgcttcgccgtaataccaggttgggatgcccagcagcagaatgtcataagcttccagatcttctttgctgctttttgcaatgtcatggacatcggcaacgtctttaccaagctgtttttgaatcatttttgcgatattttcggtattaccggtgtcgctgccgaaaaagatgccagtgatagccatgagtgaaataacctcttgaaacttattgaaatgggggtggaaaattgcccacggataaaggcaatcatagcagaacaggcagtcttgcggaatcagcaaacgagcaggactgcacactgtgctacatgaaagtggaaatttaaacgatgccctgactacgcagcgccgccagttgctgcattaacatctcttcgatcagttcgctacggctcatattgcggctctccgccagctcgttcagcgcctcgacagcttccgcgttcagcttcagttcgacacgcttaaggccacgtactttgtcgcgttttagctggttgcgtttattaatacgcagctgttcatcgcggctaagcggattagttttcggtcgtcccggtcgacgctcgtgcgcgaacagatctaatgtcgtacggtccgtttgttctttggccatgatcttggtgacttcgggggaaacaatcagccaggcctctgcccggatggatagcgcgccataatacatcagcgcgatgagtcacgccaacgcccacgcgcggaaagcgacgcggacgctgggtttttaatcagttgcgttaatcattgagatagcgacggatagcgcgtaataccgcatccggtttttcagcatggacccagtgacccgcgcctgcaatcacatgcgcccgtgcctgtggaaattgagccagtaaatcatcacggtactgctcgctaacatacggagaattgccgccagggataaacagggcagggtgatcccatgccgggattttctcccaacctacaatatgcggatactgatcccacaataccggcacgttaaagcgccactccccgtcaacaaaagatttcagcagaaactgaatcaccccttcttcattaagatgctggcgcattattgctgctgcttgctggcgagtttgtgcgtcgctttcactgaccgcgttgatagccgcaaaaatctcatcatgacggcgtacgtgatagtcgaccggcgcgatatcgatcgccaccagtttatcgatgcgatcggaggctagtgcagtaagtgccattaccgctttaccgcccatggagtgaccgataaatgttgctttgtcgatctgctgtgcatccagagtatcaacaagatcctgcgccatcgccgggtaattcattaccggatctctcggactaagaccgtggttacgcatatcaacctggatgatattgtgatcgtttaccagatcgcgagccagtacgccaaggttgtcgaggctgccaaacagaccgtggacaagaacgatgggagaattattgtgctggttttgtgcagtttgcgcgcggatattcaatttcatggcaaagttctttttttcgcgttgtcgggttagggtattatgttgaccattgtgccacagggctgcaacaaataaggtttattccgagtttttctgcaagccaggcttgacgctatccgctgccgggatttattcatatactcctggcgacttgtattcagctaagacactgcactggattaagatgaaaacgattgaagttgatgatgaactctacagctatattgccagccacactaagcatatcggcgagagcgcatccgacattttacggcgtatgttgaaattttccgccgcaagtcagcctgctgctccggtgacgaaagaggttcgcgttgcgagtcctgctatcgtcgaagcgaagccggtcaaaacgattaaagacaaggttcgcgcaatgcgtgaacttctgcttagcgatgaatacgcagagcaaaagcgagcggtcaatcgctttatgctgctgttgtctacactatattctcttgacgcccaggcgtttgccgaagcaacggaaagcttgcacggtcgtacacgcgtttactttgcggcagatgaacaaacgctgctgaaaaatggtaatcagaccaagccgaaacatgtgccaggcacgccgtattgggtgatcaccaacaccaacaccggccgtaaatgcagcatgatcgaacacatcatgcagagcatgcaattcccggcggaattgattgagaaggtttgcggaactatctaaaacgttgcagacaaaggacaaagcaatggcaatccacaatcgtgcaggccaacctgcacaacagagtgatttgattaacgtcgcccaactgacggcgcaatattatgtactgaaaccagaagcagggaatgcggagcacgcggtgaaattcggtacttccggtcaccgtggcagtgcagcgcgccacagctttaacgagccgcacattctggcgatcgctcaggcaattgctgaagaacgtgcgaaaaacggcatcactggcccttgctatgtgggtaaagatactcacgccctgtccgaacctgcattcatttccgttctggaagtgctggcagcgaacggcgttgatgtcattgtgcaggaaaacaatggcttcaccccgacgcctgccgtttccaatgccatcctggttcacaataaaaaaggtggcccgctggcagacggtatcgtgattacaccgtcccataacccgccggaagatggtggaatcaaatacaatccgccaaatggtggcccggctgataccaacgtcactaaagtggtggaagacagggccaacgcactgctggccgatggcctgaaaggcgtgaagcgtatctccctcgacgaagcgatggcatccggtcatgtgaaagagcaggatctggtgcagccgttcgtggaaggtctggccgatatcgttgatatggccgcgattcagaaagcgggcctgacgctgggcgttgatccgctgggcggttccggtatcgaatactggaagcgtattggcgagtattacaacctcaacctgactatcgttaacgatcaggtcgatcaaaccttccgctttatgcaccttgataaagacggcgcgatccgtatggactgctcctccgagtgtgcgatggcgggcctgctggcactgcgtgataagttcgatctggcgtttgctaacgacccggattatgaccgtcacggtatcgtcactccggcaggtttgatgaatccgaaccactacctggcggtggcaatcaattacctgttccagcatcgtccgcagtggggcaaagatgttgccgtcggtaaaacgctggttagttctgcgatgatcgaccgtgtggtcaacgacttgggccgtaaactggtagaagtcccggtaggtttcaaatggtttgtcgatggtctgttcgacggcagcttcggctttggcggcgaagagagtgcaggggcttccttcctgcgtttcgacggcacgccgtggtccaccgacaaagacggcatcatcatgtgtctgctggcggcggaaatcaccgctgtcaccggtaagaacccgcaggaacactacaacgaactggcaaaacgctttggtgcgccgagctacaaccgtttgcaggcagctgcgacttccgcacaaaaagcggcgctgtctaagctgtctccggaaatggtgagcgccagcaccctggcaggtgacccgatcaccgcgcgcctgactgctgctccgggcaacggtgcttctattggcggtctgaaagtgatgactgacaacggctggttcgccgcgcgtccgagtggcacggaagacgcatataagatctactgcgaaagcttcctcggtgaagaacatcgcaagcagattgagaaagaagcggttgagattgttagcgaagttctgaaaaacgcgtaaacacatttaataaaaaaagggcggtcgcaagatcgcccttttttacgtatgacaaacacagaattgcctgatgcgctacgcttatcaggcctacgaggatggtgcaatatattgaatttaagcgattttgtaggccggataaggcgttcacgccgcatccggcaaaaacaacgaacactttgtcaacaaactgagtagctcaaggaaatcccaatgaagaccaacaggagtctggtcgtcatagtgagtctaattaccgccacattactgctgactgcatgcgcccaacctgaacaaagtagtttagctggcgactggttactgacccctaaagataaaaccagaggattaacgggtagcattgcggtaaatattgcacctttccggtgtaagacaaattgccgtggtgataacttacctgataatacccgccgctggcagttgagtggcgggaacgaaaaagaacttacttatcttcataatatgagtgcacaagaaaaggtcggtttaaatcccggttggcaatgctacaccagtttttttatgcgggtttgccagggcaagcccggcactcgaccgatagtcaatgaggattatgtcagcgaaagcggattttttggcagcatgatgcatgtcgggattattgagttacgacgctgccagagtgaaaattgccagcaagaattgaaagcgataaatacacattaaaatagtgagtccgggaatgaaacccggacctgaacatgtcttattgcgtgaatgtttctttcatttgatactgcatttcccagagttcagtaaggctaataacttttcttgttcttgcttcttcactttgtacccataagaaagggtagaacgtgaaggcttccgttgcgcttaattttattacgtcttctcgccattgctgccatcgtacattttcatagaaggtatctaaatcaccggataatgcccactgaagaaactcagaatatccaacttccagactttcccaattcagcgtatctggcgcaaaataataaacgcagccagtatcttccccaagatcgccaccattaagagcaaaaattacccctgcgacatcgtcagcgatgggtaaagcccgcacgcctgcgaattcagggcgttgtgtccaacttactggatctcgtggcaaccgggggtgaccagatcctgctatgcgtaattaaccattatcaatcagcagacctccggagccatagacaagcgcacccatcggactttttgttgtcacctgtaattgataaagtgcggtttcggctaaatctttattaaccggtaagagttcggtatggtttgtggcgtcttttaaccagttctggattattggccaggcactatcttcagtatttactaactgattcatttcacgcatcgctacttgctccttgtgtgctacggtgtcatttatgatgaggaattgtatggaacattttttaaatattaagttccttatatttgaataaaaaatgactttatccatacattgccacttttttcaaagcataaaccgatacccaataccggtttcagtaataaaatggcgaggccgggccggatcctgttccagtttttgtcgcagatgccccatataattacgcaaatagttgctgtgttcgatcgcgtttagaccctacatctgccggatgcggcataaataacgaactatttgccaacaaacagaaagggcgatcattcaatcgcccttttttactttgttttattaaccgtgtttatttttcagttcaaagcgtggacttaccagaccatacagtgtccaaccaaggaaggtcacgatggaaccgtacagcatggcttcttccccggaactgtacagcgcataaaagctatacatcgcgccaacaaaagcaacaaagtttgcaactttcgctttactggggggcacattagcgaccttctgaataatgactaatgccgccatactcagaatatacggaatgatattggtcaccacggccaggttaaccagcacgttgaactgactgtttaggctcgggctaatggtcatcagtgccaatccactctgaataatcacaatggtcaacattccctgcaccggtgcatccactttggttacacgggagaaaattttagggaagtagccttcatcagaactagatttaaacacctgggcaatggtgaactgccagccaagtaggctaccgcagcaggacatcaccatcagcgccataatgactttacccacttccggcgtgaacatctgcgcgaaggccagaccaaatggtgccgtactatttgccagctccatatttggcacaatcccggcaatcacgttggtggagacgatataaatcaccgccgcacctaacgtaccgccgagtaccgcgattggcacattacgttccgggttttccactacatcagtattcgcacacgcagactccagaccaagaaaagcccacagcgtcatagcgatggaagaacctaccgcactgaagaacggtgcatgatgcggattccaggaatcaacgtacagcgtcgggctaaaccagaaccagccaataatgcacagaccgacgaccggaataatgaccccccacacggtaatgctactgatttgcccggtaatgcgcgcaccaccaaagttagccacggtacaaatccacagcaccccgatggtcgcaagaccaatctgcactgggctcaaactcgcgccgagcagttcggtgccgtaaccaaccgcgctaatagcaatcgcgacgttagcaatcagcagactgacgccgtaggtatagttcgccataaagttaccggatttaccgaaagcatactcggcataaccgcccataccgccacttttacggctgaacataccgcattttgcgaatgcccatgccagtgccatactgcctacggctgtcaccagccaggagataatactgattgtcccgacttcggcaagctttgtcggcagcatgatgataccggagcccatcatgttgaccatcgtcagtatggttaactgaacgacgcccattttgttgcttttagcctgactcataatttttcccctttcaacagggtgctttgcgcatcacgaggcttgatgacatagcaccaaacttgcttacgaccatcatgttcttcgatatagacaccctgcagctccggtgcaaaacctggcagcaggttgatcccttcttccagagcgctgaagtaacgcagaacagcaccaccccagatttcacccggaacaacacacagcacacccggaggataaggaagcgcaccttcggcagcgatacggccttctgcatccggcagacgaaccagttccacttcaccgcgtaaataggcgtagttggcttcttgcggattcatgctgacgcgtgggaagtgctccttacggaacatctctttttgcagttgtttcacgttgtggcgggcatacaaatcatgcatttcctgacacaactgacgcagggtataaccggcgtagcgctcttcatgctgtttgtagatggaaggtagcacttctgctaatggcgcgtcggactcaagcagtttttcgaagcgtaccagcagggcaacaagttgctgaagtttggccatatcttctgccggagtcagcaggaagaggatggagttaagatcgcatttttccggcactacgccattttcgcgcaggaagttagcaagaatcgtcgcgggtacaccgaacgcttcatattcgccgttacgtgcatcaatacctggggttgtcagcaacagtttgcatggatcgacaaagtattgattctctgcatagccttcaaaagaatgccagtgttcccctggtacaaactggaagaagcgcagatcaaccgcaatttgcgctgtttcatagctctgccagggtttaccatccaccagttcaggtacgaacggacgaatatgctgacagttatcgaggatcagtttgcgggcattaatgccatttaccacacaatccatccacatattacgaccgctgacaccttcatgcattttggcgttgatattcagtgcggcaaacagcggatagaacgggctggtggaggcgtgcatcataaaggcgttgttcatgcgtttgtgcggtacataacgctgttgccctttgatgtggctgtcttttttatgaatttgactagtctgagaaaaaccagcctgttgtttatgcacagattgcgtaaccagaatacccggatcgttctcattaagatccagcaacagcgggctacagtccgccatcatcggaataaactgttcatagccgacccatgcactgtcaaacaggatgtagtcacacagatgaccaattttatccaccacttggcgggcgttataaatcgtaccgtcgtaggtgcctaactgaatcacagcgaggcggaaaggacgagcctcttttgcccgctgcggtgcgacttccgcgatcagctcacgcaggtaactttcttcaaaacagtgcgcatcaatgccaccgataaagccatacgggttacgtgccgtttccagataaaccggtgttgcaccagcctgtagcaacgctccgtggtggttagatttgtggttattgcgatcaaacagcaccagatcacccggtgttagcagggcgtttaaaaccactttgttagaagaactagtgccatttaaaacgaagtaggttttatcggcattaaacacttttgccgcatgttgctgtgcaatgcatggcgcgccttcgtgaatcagcagatcgcccatcgctacgtcggcgttgcacaagtcggcacggaacagcgcctcaccaaagtattccacaaactgattccccgccggatggcgacggaaaaattcgccgccctgatgaccagggcaatcaaacgcgctgttaccttgattgacataatcgaccagtgcgcggaagaaaggtgggcgcagttgagtttcataatggctggcagcggtttctaactggcgaccataaaattctcgtcggctttcgcaattctcaaagacaccgctaatacggggcaaatactctgcgggtacacgttcttgattttcagtagcaataaataccgggatgccataacccgtggcatcgatttcatcgagttttccgcatgtaacatcgttgaggcttaaaactattgccgccacatcgatattacgactttcattaatgtagatacattctcgctgcgtggtaaaacagtccgggcaagaatcactaaccgcaatttttaatttactcatttttcatctctttattttaggtaatagcaggtcctcaatttctcgaatgagaaatcgatcgtgccggaaaaaagcaaagttaccccgctgataaataaatcaggtagattgcttttttcagaatgcagaaacccttaccagtcaggtggctgataatacaagggttaacagagaatgagcactgcggaatacaggcatatgcctgtaatacagagagtcaggaagacctgtacgctgaagtgcccttagtcggtagactaacgggcattgaagaagtgaaagtcgaagctattgcgatgagcaaacttcataatatgagttgtccgccttatatggggcatagtgcggctgttattttccatttaatttacctttcctgatgtgaatgaaggtgaagatattctatccaggaaatacggttgaactgtgaaggtgatcaataaaaaatgatcaatcttaatttatttaatgatgagctttttactcagtaatataaaatattgaattgttatttttgtgtgttgtttaagataaaaagccgtatttattattacggctttaattaataaaaggcaggctgtattaaaattaatattcaaagcataaaccgatagccaataccggtttcagtaatgaaatggcgtgggcgggcgggatcctgttccagtttttgtcgcagatgtcccatataaatacgcaaatagtgactgtgttcgaccgcgtttggcccccacacctggttaaggagctggcgctgggtgagtacttttccggcattgttgagcagcaccgccagcaggcggaactcaattggtgtgagatgcacctcttcctcaccccggtgaatcacgcgggcggctaaatcgacggtaacatcggaaaattttaccagcggatcgggcgcggtggtggcagagtggcggcgtaatgcgacgcgcagacgggcctgcaattcgccaatgccaaacggcttactcagataatcatccgctccggcatccagcgcggcgattttgtcgctctcttcgctgcgtgcggaaagcacaatcaccggcaccgcgctccactggcgcaggtcgcggataaactcaatcccatcaccatcgggcaggccgagatcgagaataatcaaatctggcttacgggttgccgcttccagcaagccgcgttgcagcgtttcggcctcaaagacgcgcatcccgtcgccctccagcgccgtgcgcagaaagcgacgaatagcctgttcatcttcaacaatcagaacgtttgtcacatatcctcatgaaattcttcaagttcaggggcagtttgctggggaagtgtaacacgaaaacaggcaccaccttccggtcggttgaacgcggtaatagtgcccccgtgtacatccactatcgcccgacaaattgccagtccaagccctacccccggtactgcgctctctttattcccgcgagcaaacttatcaaatatcgtctgctcctggcctggcggaagaccggggccgttatcccagacatccagttgtagattttcgccctcaacgtgggcatcgataccaatttcggcctgcgcacccgcatatttcaccgcgttctccagcagattaatcagcacccgttcaaagagtggcccgtcaacgtggattaaggtcagcggttctggcagagaaagattgatggggctgcttaaacccggttccagcatttgcagcgcgctgccgactacttcttccagcgttaaccactctttcttcaaattaaagccgccggactgaattcgcgccatatccagtagattattcaccagtcgggtagtgttcagcacatgctgacggatctcgctggcctggcgggcgtggggacttccttcgcttgccagatcgagcgttaagatttctgcctgaccaaacagcaccgtaagcggcgtgcgtaaatcatggctaagcgccgccagcagggcgttgcggatctgttcacgttcgcttgccatccgcgcctgttcttcgctggcggttagcgtcagccgctcaagggcattggcgactaacagcgtaaacgtctccagcaggcgctgctgttccgggatcatcaactggcgcagattccccggctccaccaccaccagcccgtaggttttctcgccgctttttagcggcaaaatctggtacggtacaccgggtaacgtgtcggtgcccgcgcccgcaggcaggcctttatcaaaactccactgcgcgatggcatcgtcccacggcgtcattccttgcggatgtgttaacggctgcaatttaccgttgtcatcgggcaacaacacctgactgcgggcatgaaacgtggaggcaataaattgttcgctggtggcagcgatatcctgcggactgcggcccaccgccagagctttgctcatttcatataagtgccgtgtgcgttgctcgcggtaacgggctacccgcgcctgataacgcacgccagcagtaaggttcccgatcaccagcccgacggttaacatcaccgcgaaggtcagcagatattacacatcagagacggcgagcgtgccgcgtggggcgataaaaaagagatcgaaactcactacattaatgacggtggcaaccacactaggccagcgtccataaaatagcgccaccaccaccacgccaagcagatacagcatcaccaggttggcggcatcaaacgccatcagccactgcatggcaattaaggtgataacggcgcataacgcggcggcaaccacgcatccctgaatttgtacacgccacttgtctttaaaagagcggttatccggcgcgttgttaatcgtgcgggcgggtggttcatcaagcgcgaccagcacctgatcgagatcgggggcgatgcgcgccagtcggtcagcaaacgtttcccgacgccaccagcggcggctggccgggcgaccgagaataatcttgccgagattatgttcacgggcataacgcactaccgctttctcttccgctggatcagaaagtgttgccgtctccgcgcccagttcctgcgccagacgtaaggcgctgagaattgcccgacgttttttttccggtaagcggtgcagggcaggggtttcaacatacaccgcgtgccagacgctacccagccgactcgccagccgcgccgctgcgcggaccagtttttcgctgccggtgttatggccgatgcataaaaggatcgcgtcgcgcgtgcgccacactttctcttcgccaggatgcccccgccaggcgcgcatttgctcatcaacgcgatcggcagtacggcgcagtgccagttcgcgcagggcgatcagattacctttgcggaaaaaatgttcaatggcgcgctccgcctgcccggcaatatagactttgccttctttcagccgctggcgcagatcgtccgggggcaagtccaccagcaccacgtcgtcggcggcatcgaaaaaaggatcgggcacggtttcccgtacctgaattccggtgacgccgctgaccacatcattcagactttccagatgctgaacgttgacggtagtgaaaacatcaatgccagcttccagcagttcttcgatatcctgccagcgtttgggatgacgggaacctggcgcattactgtgcgccagttcgtccattaagatcagcgccgggcggcgggcgagggcggcatcgagatcaaactcgctgatatgccgcccacggtacgcctggcgttttaacggcagaacagccagcccttccagcatggcggcggtatcttttcgcccgtgggtttctaccacgccaaccacaatatccagcccttgcgcccgcagtcgctgggcttctgccagcatcgcccaggtcttcccgacgcctgcacaggcaccgaagaaaactttcagcttcccccgatgcggcgcggcagtttgttccagcagacgatcggggtcgggacgtaagggttcgttattcatcaagtttatccagcgccagattgagttcaacaatgttgacaaccggctggccgatatatttcaccagcggttgttggctgtattttgcgatcagttgcgtgagctgttcaacgctgagattacgcgctttcgccacgcgtgggatttgccaggccgccgcttgcggggtgatattattgtccagcccgcttgcgcttgccgtcaccagttcaaccggaacgctcgcgctggcatccgggttagcggcccgtaatgcagcaacgcgtgcggctattagtttatccagctcagggttactgaccgccagattgctcccgccagaagcctgtggattatagggcatttctgccgttgcgctcgggcgaccatgaaaatagccgttgccggtaaaattctgcccgattaatgcgctaccgcgcaccgtatcaccttcacgaatcaagctaccattggcctgccagggaaaccaccattgccccagtacggtggtcagcagcgggtaaacgccgccagtaatcaataacagaaagataaatgtacttaatgccggacgtaatccactcatggtaaacctcacaccagaccgcaaacggtcagcagtaaatcaatgactttgataccgataaacggcaccagcagcccacccagaccgtaaatccataagttacggcgcaacatggcagaagcggtaagcggtttataactcacgccttttaacgccaggggaatcaaaaagacgataatcaaggcgttgaaaatcaccgcactgaggattgcggagtcggggctatgcaggcacatgatgttcagcgcatttaactgcggatacgttgccgcgaatgccgccggaataatggcgaagtatttcgccacatcgttggcaatgctgaaggtggtcaggctgccacgggtcatcagcatctgtttgccaatgtgcaccacctcgatcaacttggtcgggttagagtcgagatcgaccatattgcccgcctctttcgccgcctgggtgccggagttcatcgccaccgcgacatctgcctgcgccagcgccggagcatcgttggtgccgtcgccggtcatcgctaccaaacgaccttccgcctgatactgacggatcaatgccagcttggcctccggtgtcgcttcggcgagaaaatcatcgacacccgcttccgcagcaatcgcggcggcagtcagacggttatcgccggtaatcatcaccgttttaatgcccattttgcgcagctgggcgaagcgctctttaataccgcctttgacgatatctttcagcgcaataacgcccagcacacgagaaccttccaccaccaccagcggcgtggctccctgacgcgcaacctgatcgactttttgatcaacatcggtagggaagtgaccaccgttagcctcaacatggcgacgaatggcatcgacagaacctttacggatcatgcggttgtcgatgttgatcccgctcatccggctttgcgcagtaaacggtacaaaggtggcatggaggctctgcacatcgcgctcgcgcaggttaaaacgctgcttggcgaggatcacaatactgcggccttccggcgtttcatcagccaggctagccagttgtgcggcgtcagccagcgttttttcatccacgccctgcgcggggataaactcgctcgcctgacggttaccgagtgtgatggtgccggttttatccagtagcagaacgtcaacgtcacctgccgcttcaactgcacgtccgctggtggcaatcacattcgcgcctagcatccggctcatcccggcgacgccgatcgcactcaacaggccgccaatagtggttgggatcagacagaccagcagcgccaccagtaccgttacgctgactgcattaccgccccacgcggaaaacggccacagcgtggcggttgccagtaaaaagacgatagtcagggcaatcagcagaatggtcagggcaatttcgttcggcgttttgcgtcgctgtgcgccttccaccatcgcgaacatccgatccagaaatgtctcgccggggttaacgctacactcaatcaccagccagtcagaaagaatacgcgtgccgccggtgacggaggcaaaatcgccgccggattcacggatcaccggtgcgctttccccggtgatggcgctttcatcgacgcttgcacccccttcaataacttcaccatcgcaggggataatatcgccagcttctaccagtacgatatcgcctttacgaagttggtcggcaggaactttgtccgccgcagcgccatatttcggctcacgcagcttgcgggcaaaggcagtttttttcacccctttcagactgttggcctgcgctttactgcggccttctgccagcgcctcggcgaaattagcgaacagtacggtgatccacagccaaccgctaatggccgcgctaaacagcgcattgccgggcatcgcaccgcttgccatcgcgatgctaatacaggtggtcagcagactgccgatccagacgataaacatcaccggattgcgccattgcgcctgcgggtttaattttttcaccgcttctttcagcgcctgaacgacaagtgttggttcgaatagcgccagttgtttacgactcatattcagtgctcactcaatatcatcaggagagatattccgccaccggaccaagcgccagggcagggataaaggtcagtgcgccaaccagcaacacggtgccgattaacaggccaacaaacagcgggccgtgcgttggcagcgtgccggagctggcggcttggctctttttactcaccaggctaccggcaattgccatcaccgggataatcaccccgaagcgaccgacaaacatgcagaacgccagtaaacagttccagaacggagagttggcgcttaatccggcaaaggcgctgccgttgttgttagcggcggaactcacggcgtacagcacttcgctaaaaccatgcgggccagggttgagcatggcgctacgtccggcgtcggtcatcatcgccaacgccgcgcccatcagcaccagcgtcggggtaaccagaattgccagtgcagtcagtttcatctcgcgtacgtcgatttttttacccagatattccggtgtacgaccaatcatcagcccggcaataaacaccgccagcaggacaaacagcatcatgccgtaaagaccagaaccgacaccgccgaacaccacttcaccaatttgcatcagccacatcggcaccatgccaccgagagcggtaaagctatcatgcatcgcaatcaccgcgccacaggaagccgccgtcgtcacgaccgcaaacaggctactgaccagcacgccgaaacggctctctttaccttccatattgatgctgctgtccgtgcccagtgccagcagatgaggattaccctgaacttctgcccacatcaccacgcctacgcagatgacaaaaatcacactcatcgcccacagcaacatgcgcccctggcggcgatcgcccatcacttcaccaaaggcaaagcacagcgccgttgggatcaagaagatcgccagcatctgcacgaagttggtcagtgcggttgggttttcaaacggatggctgctgttggcattaaagaagccaccgccgttagtaccgagcatcttgatcgcttcctgagaagctacaggccccatgggtaacagctgttgcgctccttcaacggtattcacagcctgataaggcagaaagttttgcagcgcaccttgttgaataaaaaacagtgcaatcaacaacgccacagggactagcacccataacgtgatgcgtagcagatcgacccaggcattcccgagcgtgctcatgctctggcgggtaaacgcacggatgagggcaaaaatcaccgcaatcccgctggcggcagaaagaaagttttgcaccgttaagcccgccatctggctgaaatagctcaacgtggtttcaccgctataagattgccagttggtattggtgacaaagctgacggcggtattcagcgccagatcccagctcagccctggcaactgctgtggattaagcggcagatagtgctgaccgagcaacataaaaaacagcaccgccagccccagcatgttcaggccgagaatggcacaaagatattgcttccagttcatctcacggtcagagacgccaagtgcgcgaaaaagtacgcgctcaacgcccgttgtaccgggaagaggaatgtcattaatcagccgcgccagcccgctgcctaaaggacgcgccagcaccattaacaccagtaaaaacgtggcgatcagtaagaacccttgcgcagccatcagaacgcctccgcattgatcagggcataaaccagataacccagtaataaaaacaccagcaatacgccggttatcacgcctgcactcacagtgcacctccagtggcctaaaagtgataccggaagggtagaattctggctgcaaagatttcgcaaaaatctgcgggcggggtgtaaaaaaagtataaaaatggcaaaagccatgatttaactaatgtttagtattaatttaacttttgtgtaacttaattacaggatgaatgtaaataaaccatcaataagcaaaaataagtggtcggatgagtagtaaaattacacaaaaggcggtactattttcatcagataaacaaattcatttttccggtgccattcaccgggtagatacaaaagggggagaaaagtatggaactctacagagaatatcctgcatggcttatctttttacgccgtacttatgcggttgcagcgggcgttctggcgctgcctttcatgcttttctggaaagaccgcgcccgcttttacagctacctgcatcgcgtctggagcaaaaccagcgataaaccggtgtggatggatcaggccgaaaaggcaactggtgatttttattgattgctgagttttgaatacattgaacgtctacacttactcctgtaaaccgctcaggagcagtaatgaatctacaacgatttgatgacagcaccctaatccgtatctttgcccttcatgagttacatcgactgaaagaacatggcttaacgcgcggggcgcttctcgattatcacagccgctataaactcgtctttctggcgcattctcagccggagtaccgcaaacttggcccgttcgtggctgatattcaccagtggcaaaatctggatgactattacaaccagtaccgccaacgcgtagttgttttgctttctcaccccgccaacccgcgcgatcacaccaatgttttgatgcacgttcagggttattttcgcccgcatattgattccacagaacgccagcagctggctgcgcttatcgacagttatcgccgtggcgagcaaccacttcttgcgccgctgatgcgtatcaaacactatatggcgctttatcctgacgcctggcttagtgggcagcgttatttcgaactttggccgcgtgtgattaacttgcgccatagtggagttttatgactacccatctggtctggtttcgccaggatttacgtctgcacgataatctcgcactggctgccgcctgccgcaatagctctgcacgcgtgctggcgttgtatatcgctacaccacgccagtgggcgacgcataacatgagcccgcgtcaggctgaacttatcaatgctcaactgaatgggctacaaatagcgcttgcggaaaaaggtattcctttattgttccgtgaagtggatgactttgtcgccagtgtcgaaatagttaaacaggtgtgcgcggaaaacagcgttacccacctgttttataactatcagtatgaagtgaatgagcgggcgcgggatgtggaagttgaaagagcgctgcgtaacgtggtgtgtgaaggatttgatgacagcgtgatcctgccgcctggcgcggtgatgaccggtaatcacgagatgtacaaagtctttacgccttttaagaatgcctggctgaaacggctgcgggaagggatgccggagtgcgtcgctgcgccaaaagttcgtagtagcggaagcatagagcccagcccatccattacgctgaattatcctcgtcagtctttcgatactgcgcattttccggtggaagaaaaagcggcgattgcgcaattacgccagttttgccagaacggtgccggagaatatgagcaacaacgagattttccggcagtggaaggcaccagccgtttgagcgccagcctggcaacgggcgggttaagccctcgccagtgcttgcatcgcttgttggctgaacagccgcaggcgctggacggtggggccggtagtgtctggcttaatgagctgatctggcgcgagttttaccgtcacctgataacgtatcaccccagcttgtgtaaacatcgtccatttattgcctggacggatcgtgtacagtggcagagcaatcccgcacatttacaggcctggcaggaaggcaaaacgggatacccgattgttgatgccgctatgcgtcagcttaacagcactggctggatgcataacaggctacggatgattacagccagttttctggtgaaagatttattgatcgactggcgcgaaggcgagcgatatttcatgagccagctgattgatggtgatttggcagccaataacggtggctggcagtgggccgctagtaccggaaccgatgcagcgccgtattttcgtattttcaacccgacaacccagggcgagaaatttgatcatgagggcgagtttatccgccagtggctaccggaactgcgcgatgtgccagggaaagtggtgcatgagccgtggaagtgggcgcagaaagcaggtgtgacgctggattatccgcaaccgatagtcgagcacaaagaagcgagagtacaaacgttggcagcgtatgaggcggcgcggaaggggaaataacagacgcgtcaggcaatcgagcccagatgccggatgcggcgtgaacgccttatccagcctacaaatttgtgcaaattcaataaattgcaggaaatacgtaggcctgataagacgcgtcaagcgtcgcatcaggcatcggtgctggcctattaagactccagcgccagcgcgcggtttctgaatttcagcgcctgatacagccaaatcatcagtaccagtcctacacacgccagtgcgccccaggtaatttgatcaaatacttcaatatatgcattgatggagtagttgatcgccccggaagcatcaaagctagcctggcttgtctgatcggcaatcacgcccgccagatagttcgcgatcgcgccagaaagcagcatgtagatgccggttaatacgccggtcacaccggggatttcaatgcgcgtaatttggctcatggcaaccgggtcgataaacagttccgcaaagcccatcaccgccaggcctaataccatcagtggcagagaagagtgaccatacattgcggaccagcgggcgcttaaggtcagaatgcagaatccggcgctcatcaggccaaggccaagagcaaatttcccccagatgcgcacggtacgattacccgcgacactctcttttaccacccacgccaggaacacaccgcacagcataactgcgaaggcattaatgctctggaacatcgcggtcggaacggtataaccaaacatatcgcggttaacgaagcggtcgatataaaggctaatgctgctaccgccctgttgtgcgaaggcccagaacaacatactgaagaaggtgagcgtcacaatcagccccagctccttccgctgtttctggttttctgctttgcgataaatttttgccagtacacccaggccaataatagtcgcgacaattaaggcgtatacgctccactctttccagaacagtatggtaatcagtgcaggcgttgccaccagcagaaccagcagccatccccagttcggcaggagaaagtttgtcgcacgcagtacttttttgttaacgccgcgggtatgagtgaaatgacgattgccacataagaaaatgaccagacccgcgatcatgccaaccgccgccaggccaaagcccatcgcccagctgtactcttcctgggcgtaaccacaggcgataggtgcgataatagaccccacgttacccgccgcatacatcaggctgaaaccgccatcacgacgcggatcggttggctcatacagctcgccgagcagacagcttacgttagatttaaacaggccatagccgcagacgataatcgccagggacagatagaggaaactcggatggatctcactggcacccagcaccacatgaccgatcgccatcaacaacgcccccagcatcaccgccatgcgattgccgagaactttatccgccaaaaagccaccgaggattggcgtgacatacaccaggctacagtaggcgctaaataactcgtaggcgtgagtatcgttgtattttagttgattggtgagatagagaatcagcagggcacgcatgccgtaaaagctaaaatattcccagatttgcagcgcaacgacatagtaaatagcgcgcggctgacttgcgtgtttattcataataattccacaattgacggcaacgtcacgtaatagttgcgcggcgtgcttgtgtttccttaaagttaaaactttgatacagatctgattatttatgcaatatgctgtctgattgcataaatatacattagctgaagcgtgatgatataaacaatttgcgtcttttggcgtcgggtttgtttcttaatatgtcaaaagattggctatcgacgaactggcgaggtaacgctatgttaacggtgtagctatcagaatacggaaggcgcgaagatgaaaaacaccgaactggaacaactgattaacgaaaaactgaacagcgcggcgattagtgattacgcgccgaatggtttgcaggtggaaggcaaagagacggtgcaaaaaattgttaccggtgtcaccgccagccaggctttgctcgatgaggcagtgcgtctgggcgcggatgcggtcattgtgcatcatggctacttctggaaaggagagtctccggtcattcgcggaatgaagcgtaaccgtttaaaaacgttgctggcgaatgatatcaacctgtatggctggcatttgccgcttgacgcacatcctgagctgggcaataacgcacagctggcggcgttactggggatcacggtcatgggcgaaattgagccgttggtgccgtggggcgaactgaccatgcctgtgccgggactggagctggcttcctggattgaagcgcgtctgggacgtaagccgttatggtgtggcgataccggacctgaggtggtccagcgcgtcgcctggtgcacgggcggcgggcaaagttttatcgatagcgccgcgcgttttggcgtggatgcttttattactggcgaagtttctgaacagaccattcatagtgcccgcgagcagggattgcatttttatgctgcaggtcaccatgccactgaacgtggtggtattcgcgcattgagcgagtggctgaatgaaaataccgatcttgatgtgacctttattgatattcctaatcctgcataacgaataatcagagggatcgaaagtgcaacgagcgcgttgttatctgataggtgaaacggcggtagtgctggaactggaaccgccggtgacgctggctagccagaaacggatctggcgactggcgcagcgtctggtggatatgccgaatgtggttgaagccattcccggcatgaacaatatcacggtgattttgcgtaatcctgagagcctggcgctggatgccatagagcgtttgcaacgctggtgggaggagagcgaggcgctggagccggagtctcgctttattgaaattccggtggtttacggtggtgcaggcggaccggatttggcggtggtcgcggcgcattgcgggttgagcgaaaaacaggttgttgaattgcactcctccgtggaatacgtggtctggtttttaggttttcaaccgggcttcccgtatctcgggagtttgccggaacaactacacacgccacggcgcgctgaaccgcgcttactcgttccggcaggttctgtcgggatcggcgggccgcagactggtgtttatccgctggcaacgccgggtggctggcagttgattggtcataccagtctcagcctgtttgatccggcgcgtgacgaacccatcttattacgtccgggagacagcgtgcgctttgtaccgcagaaggagggagtatgctgaagattattcgtgcgggcatgtataccactgtgcaggatggcggtcgtcacggttttcgccagagcggtatcagccactgcggcgcactggatatgcccgcgttacgcattgctaacctactggtgggtaatgacgccaatgcccccgcgctggagatcacgctcggtcagttaactgttgagttcgaaactgatgggtggtttgctctgacgggtgccggttgcgaagcgcggctggatgataatgccgtctggaccggctggcgattgccgatgaaagcaggccagcgtttaacgcttaaacgcccgcagcacgggatgcgcagttatctggcggtcgcgggtggtattgatgttccgccggtaatgggcagttgcagcaccgatctcaaagtggggattggcgggctggaaggccgtttactgaaggatggtgaccgactcccgattggcaaaagcaagcgtgattctatggaagcgcagggcgttaaacagctgctgtggggcaaccgcattcgcgccttgccggggccggaatatcatgagttcgatcgcgccagccaggatgcattctggcgtagcccctggcagcttagcagccaaagtaaccgcatgggctatcgcttacaggggcaaattttaaaacgcaccaccgatcgcgaactgttatctcacggtttgttaccgggcgtggtgcaggtgccacataacgggcagccgattgtgttgatgaacgacgcacagaccaccggtggttacccgcgtattgcctgtatcattgaggctgatatgtaccatctggcgcaaattccgctcggtcagccgattcattttgtccagtgtagtctggaagaggcactaaaagcacggcaagatcagcaacgttattttgaacaattagcgtggcggctgcacaatgaaaattgacctgaacgccgatctgggcgaaggctgcgccagcgacgcagagctattaacgctggtttcctctgccaatattgcctgtggatttcatgcaggcgatgcgcaaatcatgcaggcttgcgtgcgtgaagcaataaaaaatggtgtcgcgattggcgctcacccgagttttcccgacagggaaaattttggtcgcagcgccatgcagctgccgccagaaaccgtttacgcccagacgctgtatcaaattggcgcgctggcaacgattgcccgtgcgcaaggcggcgtaatgcgtcatgtcaaaccgcacggcatgttgtacaaccaggcggcgaaagaagcacaactggcagacgccatcgccagagcggtatacgcttgcgatccagcattgattctcgtcgggctggcgggaagcgagctgattcgtgcaggcaagcaatatggtctgacaacgcgcgaggaagtgtttgccgatcgcggttatcaggctgacggcagcctggtgccgcgaagccagagtggcgcgttgattgaaaacgaagaacaggcgctggcgcaaacgctggagatggtgcaacacggcagagtcaaaagtatcaccggcgaatgggcaacggtcgcggcgcaaacggtctgcctgcatggcgacggcgagcacgcactggcgttcgcccgccgactacgctctgcatttgccgaaaaggggattgttgtcgcagcataaccccgattaataaagaatgaaaaaaggatatcaccatgcctgaaggcccggagatccgccgtgcagcggataacctggaggcggcgatcaaaggcaaaccactaactgatgtctggtttgccttcccgcagttaaaaccttatcaaagtcaacttatcggtcaacacgttacccatgtggaaacgcgtggtaaggcgttgttaactcatttttccaacgacttaacgctctacagccataatcagctttacggcgtctggcgcgtggttgataccggcgaagagccgcagaccacgcgagtattgcgggtaaaactgcaaacggctgacaaaaccattctgctttatagcgccagcgatattgagatgttgaccccggaacaactgaccacgcatccgtttttacaacgcgttggtcccgatgtgctggatccgaatctgacgccggaggtggtgaaagaacgattattgagcccgcgctttcgtaaccgtcagtttgctggattactgctcgatcaggcgtttctggctgggcttggcaattatttgcgggtggagatcctctggcaggttgggttgactggaaatcataaagcgaaagatctcaatgcggcgcaactggatgcactcgcacacgcgttactggagattcctcgattttcctacgctacgcgggggcaggtggatgagaataagcatcatggggcgctgtttcgctttaaggtttttcatcgagatggcgaaccgtgcgaacgttgtggcagcatcattgagaaaaccacgctgagttctcgcccgttttactggtgccctggctgccagcattaagcgctccgcttcggcgcataggtactaataaaccgcgcaatggcaggccctgtcagcaaaatactgaacaggcgtagggtttgcatcgccataatgagcgccatatcggcattgctccctgcggcgatgaccgccacggtatcaagcccgccggggctggtggcgaggtaggcagtcataaaatcaatgtgcataaaccgggtcagcccccacgccatacccgcacaaatagccagcagagcaaaaatgctcagcaggatttgcggtagcgggcgtagtgcccgcagtaagatttgtttatcgaaaccaagaccaatccgccagccaattgccatatacgccatcgccagcagccattccggtagttcgatggtgatgagctgaccagactggagcactgcgcccgccagcatcgggatgagcatcgtgccggaaggaagacgcagcaggcatcccactgtaccggcaacgaccgcgagcaaaatagtaagcaggagattaatgctcactggcgggaaccagacgatatgctggttaaccgcttcagcgttatcgcccagcatcatgcgggtgaccagaacagcggcccccgcgacgaacagcactcgcagatattgcataaacgccaccaggcgaatatctgcgccgtaatcttgcgccatagcgaccattgccgccgcgccgccaggagaggagccccaggcaccggtatttccaggcaaactgctatagcgcaccaataaccaacccacaatggcgctggaaagcagcgttaccagtaaaattgcaagcacgatcggccagttgacggccagggtggtgagaatgctaccagtgaggttttgcgcaatcatgcagccaagaatggcctgggcggcgagaaaagcagagcggggaagttgcagagtaattccgcgcatactaaagatgatcccggcgatcatcggcccaagtaatagcgccgccgggagatgtaccgcgaggaaaccaatagaaaggagaagacttagcacacataacattccccactgcaaaactggcatccttcgctccctcattattttctctttggtgtatcgatacagcataaagaaagctgggccaggaaaaaataacagcaatcaaggaaaaggggaaaatcagcaattttctgaaagagatgccctttccggcggcaaagggcatcatggtaaatcagttatagttaatcttaaaaagcaccactgtatcgaaggggccagcctcgatgggggtgcctggaatggagctaagttcagccgtataggttttttcgtagaccaacatgtcactggtgaaatcggcgtattcagcatatttattgaaggtataagggctggcgttttcatccagtaaacgtagcttcagaccattaccaatcaacaatgctttatcttcttcaaccaacgtttcttcggtataaaaggaggaactgactttaaatccgtcggtgcattgatcgttttggctcttggtcgttttaatactgaacgttttgctcattgtgtggcgacgtatatccagcaaattaaatttaccaaaatcaatcacctgtgtttccggactaatggaaaaattgacgctgcaatccagcacgcgaatgttttccagaccagtaatatgatatttcaggttttgggcagtagggtcttcgttaacgctaccggcaccgtcaaattgcacgacgatatagtcgctaagcgtactttgataatcatgcggcggcatttctcgtattttgacgtataaccgcatgcgagcgagaaaggtacggctcatatgaatattagcgggatcgccgctgcaaattttgttctgccatcccatcgcgatgatctgctcaggggtataaatatcaatgttcttactgtcgatacactggttagtgtcgatgcgactttttcccagactggcatcgtaatcgacaccgttgtatgtcacgccgagttgataataacgatcctgcacccccggataggggtttacccaggcgtagacatgctcgctttcaaagttgccgttggtattgttgtcacaatagacgggaattttaatatcgtcagattcccagatcttatcaccgggtttggcattgcctggtacagcaaacggttgaatcgcttcacttttttctactgcgccaccagatgtaccaaaatagcagttcagcgccattgcagacttcaacggcagaaataacaggcagatgacgagcaacaatcccttgccagcactcatttcgcctccactgcttgtaaacggcattgtccgctgcagttgagcgtcgtcatgcgtaatgcgccgtaatcatccatgtaaccgagataaaactggctgccgctataacttccggtgtttgtgttgaccgtactaaaaggtgcaaccatcacggttttgaagcctgggagaacgcctttttcatttctccccagataggcaatggtcagataatacgcggtaggatttttcagtgtcagttggttgccctgctggctgacctgtaactgcagttcgaccttttctcctgctttcttgcgtaatgcagccggtcgccagaacaatttaatacgactttgaatagcgacctgaagtatcgcatggtcgctgcttttatccggagcgggaggaatttcgcgcatattgtagaaaaatagcgtttcgcgatcgccaggtaattgtgtggtactggcttgtttcacaacccgcacctggcttgtcgctttcggttccagacgttgaatagggggcaaagcgaccagaagagcatcgcttttctcccctttttcattttctatccaggaataagcaagataaggcagtttgtcactttggttttcgatacgcaggctggtggctttgtcattggcgttaaacacaatgcgtgtgcgatcgggttgcaccgcagcattgcaacccaagctgatggttaacaacattaagggtaatcctttaataaatgtcattctcttttccttaattaatgacaaggtaaaatcaggcgtttggtcgtgtcttccagacgttctggcagatgaataatgcagctttgctcaccccagaccacggtaaacagttgattttcagcgacaccgcttaaccaggcatgtccttcctcgccaaccatacccacgctaatgccgctgtcatcctggcggatatccgcaccgaggggagggaactgaccgctggcgttgcgtatgatgacgttaacgtctttaccggaacgggaagccagacttttgtaacctatcgcgccttcaatccatgtttccttgatgacgttttctgcaactgttacgccgtcgggtaagtcattcatgttcaccgccacggtggaaggctggtaactggaaatcaacggcaccaccgcaatgccaaaatggttggtgtagtcgagattgccctgaaccggaatatctgccacgccatcggtgctgaccatcaggcgtggttcattggtggagctgcggcgatgaaatgctgcaccatattgggttgcggtgaaagaaccgctccagctgctgctgacggaactgtaatcactggcggcataggtaccagaaatatcccactcacccgcactactcaggtgctgatagttaccgctcacctgggctccattgtccggacgatcggattgcagtccggcagacatgccccagctattacgttcatccagcgtatcgttccagctcatgcggtgtatggtgctgtggctactgttttgcatgtcatagccaacccgaccaccgttaccgaaggggaggctaatgctcagataaatctggttgtcgcgatctttatcttcgtagtgggtcgtattgaaactcgtgctaatgctgatatctctccagtcaccaatatcaacattaaaacctgctgtgatgttggcggtcgtggaggcgtctgcattccaccaggtttgatgtagcaggttggcgtaaagattgaggtttagtggggtaatcggttggcccacggataagctgatcgtctgtttttcgtcctgcgcatcgctgtcgttgtatttgtgatccagatagttggcgtagctgtgaaaatgacgatcactgaagcgataagcggcgaggctaatcgtgctgttggtggcatccacttgtttgctgtaattaaaacggtagcttaagccccgctcgtcctgctgagtatcaaaatggctactggcccaggtgacatcaaaggacagtgcgccaagccacagcatattttgcccgatacccattgcggcagaatggtagtcatcatcagaaatcagcaggccgccgtacaggctggtgttactgagcatcccccaggaaacttcattgctaaaaaaggtttcattttcagtttgatgactcatggaaggccgtggctgacccgcggccaatttatagcgaacctgtccctggcgagtcaggaagggcgtgcttgctgcgctaacctggaaattgttcacccgaccatcttcttccgtcactttgacatccagcgtgccctgaacagactgattgaggtcatcaataataaacgggcctggcgggacttttttctggtaaatgacgcggccactttgactgatcgtcaccgtggcattggtctgtgcaataccgctaatttgtggggcgtagccacgcagctcccacggtaacattcgatcgtcactcgccagtgccgcgccggtataagaaaaaccatcgaaaatattggaactgaaatcggtttcgccgagggttaacttagagcctaattgcggtaatggacgaaaaagataggtgcggcttattccgccactctggtcatggttatcttcgctatcggtcttattaagctggtaatcactgcgtaagcgccatgccccggcgttaattccggcggtaccgtaggcattcaggttagtgctgctgctgccgtcctgtgggcggtagctgctggcaaacaagttgtaatccatcaggacaccggcaacaccttctttccatgtagaggggggagcccagttttcactgtgccacgccagccaggcttgcggaatactaatattcagttgctgattggcttgatcgaaattgaagagcatttcaggtcgggaactgaaatcaatacaccgatctatctgtggcaaggactgacggacatctggttttaaaccaaatttatcgaccagactatcattgatgcatggaatggttttgtcaccctttttttgccagttaattttttgcccattactgattttgttgttattcaccgcaacgctaacaaaatattcaccgggagcaatgactcctttttcctttaataaactaatatcaatgcggtcgcgcatacttttatcgagaacattcagattgaattcgaccgccattgcgcaaggcatcgccatgaccaggcaggatacaaaagagagtcgataaatattcacggtgtccatacctgataaatattttatgaaaggcggcgatgatgccgccaaaataatacttatttataatccagcacgtaggttgcgttagcggttacttcacctgccgtgacatcgactgcattatcaatttgttccatccaggcgaaaaagttcagcgtctgttcactactgcttgcatccaggtcaagatctggcgcggcactacctaatacgatgttaccgtcatttttgtccatcagtcgtacaccgaccccagttgcttcgcctgcactggtgttgctcaacaaaggcgtagcaccagttgtcttagccgtgctatcgaaggttacgccaactttggataccggcattccgctaccgttgtcagaagcaggcagatcacagttgatcaagcgaatgtcgacggccactttattgctatgatgctcccggtttatatgggttgtcgtgacttgtccaagatctatgtttttatcaatatcttctggatgaatttcacaaggtgcttcaataacctcccccttaaagtgaatttcgccagaaccttcatcagcagcataaacaggtgcagtgaacagcagagatacggccagtgcggccaatgttttttgtcctttaaacataacagagtcctttaaggatatagaataggggtatagctacgccagaatatcgtatttgattattgctagtttttagttttgcttaaaaatattgttagttttattaaatgcaaaactaaattattggtatcatgaatttgttgtatgatgaataaaatataggggggtatagatagacgtcattttcatagggttataaatgcgactaccatgaagtttttaattgaaagtattgggttgctgataatttgagctgttctattctttttaaatatctatataggtctgttaatggattttatttttacaattttttgtgtttaggcatataaaaatcaacccgccatatgaacggcgggttaaaatatttacaacttagcaatcaaccattaacgcttgatatcgcttttaaagtcgcgtttttcatatcctgtatacagctgacgcggacgggcaatcttcataccgtcactgtgcatttcgctccagtgggcgatccagccaacggtacgtgccattgcgaaaatgacggtgaacatggaagacggaatacccatcgctttcaggatgataccagagtagaaatcgacgttcgggtacagtttcttctcgataaagtacgggtcgttcagcgcgatgttttccagctccatagccacttccagcaggtcatccttcgtgcccagctctttcagcacttcatggcaggtttcacgcattacggtggcgcgcgggtcgtaatttttgtacacgcggtgaccgaagcccatcaggcggaaagaatcatttttgtctttcgcacgacgaacaaattccggaatgtgtttaacggagctgatttcttccagcattttcagcgccgcttcgttagcaccgccgtgcgcaggtccccacagactagcaatacctgctgcgatacaggcaaacgggttcgcaccgctagagccagcggtacgcacggtggaggtagaggcgttctgttcatggtcagcgtgcaggatcagaatacggtccatagcacgttccagaatcggattaacttcatacggttcgcacggcgtggagaacatcatattcaggaagttaccggcgtaggagagatcgttgcgcgggtaaacaaatggctgaccaatggaatacttgtaacacatcgcggccatggtcggcattttgctcagcaggcggaacgcggcaatttcacggtgacgaggattgttaacatccaggctgtcgtgatagaacgccgccagcgcgccggtaataccacacatgactgccattggatggctgtcgcgacggaaagcatggaacagacgggtaatctgctcgtggatcatggtatgacgggtcaccgtagttttaaattcgtcatactgttcctgagtcggtttttcaccattcagcaggatgtaacaaacttccaggtagttagaatcggtcgccagctgatcgatcgggaaaccgcggtgcagcaaaataccttcatcaccatcaataaaagtaattttagattcgcaggatgcggtactagtgaagcctgggtcaaaggtgaacacacctttactaccgagagtacggatatcaataacatcttgacccagcgtgcctttcagcacatccagttcaacagctgtatccccgttgagggtgagttttgcttttgtatcagccatttaaggtctccttagcgccttattgcgtaagactgccggaacttaaatttgccttcgcacatcaacctggctttacccgttttttatttggctcgccgctctgtgaaagaggggaaaacctgggtacagagctctgggcgcttgcaggtaaaggatccattgatgacgaataaatggcgaatcaagtacttagcaatccgaattattaaacttgtctaccactaataactgtcccgaatgaattggtcaatacttccacactgttacataagttaatcttaggtgaaataccgacttcataacttttacgcattatatgcttttcctggtaatgtttgtaacaactttgttgaatgattgtcaaattagatgattaaaaattaaataaatgttgttatcgtgacctggatcactgttcaggataaaacccgacaaactatatgtaggttaattgtaatgattttgtgaacagcctatactgccgccaggtctccggaacaccctgcaatcccgagccacccagcgttgtaacgtgtcgttttcgcatctggaagcagtgttttgcatgacgcgcagttatagaaaggacgctgtctgacccgcaagcagaccggaggaaggaaatcccgacgtctccaggtaacagaaagttaacctctgtgcccgtagtccccagggaataataagaacagcatgtgggcgttattcatgataagaaatgtgaaaaaacaaagacctgttaatctggacctacagaccatccggttccccatcacggcgatagcgtccattctccatcgcgtttccggtgtgatcacctttgttgcagtgggcatcctgctgtggcttctgggtaccagcctctcttcccctgaaggtttcgagcaagcttccgcgattatgggcagcttcttcgtcaaatttatcatgtggggcatccttaccgctctggcgtatcacgtcgtcgtaggtattcgccacatgatgatggattttggctatctggaagaaacattcgaagcgggtaaacgctccgccaaaatctcctttgttattactgtcgtgcttagtcttctcgcaggagtcctcgtatggtaagcaacgcctccgcattaggacgcaatggcgtacatgatttcatcctcgttcgcgctaccgctatcgtcctgacgctctacatcatttatatggtcggttttttcgctaccagtggcgagctgacatatgaagtctggatcggtttcttcgcctctgcgttcaccaaagtgttcaccctgctggcgctgttttctatcttgatccatgcctggatcggcatgtggcaggtgttgaccgactacgttaaaccgctggctttgcgcctgatgctgcaactggtgattgtcgttgcactggtggtttacgtgatttatggattcgttgtggtgtggggtgtgtgatgaaattgccagtcagagaatttgatgcagttgtgattggtgccggtggcgcaggtatgcgcgcggcgctgcaaatttcccagagcggccagacctgtgcgctgctctctaaagtcttcccgacccgttcccataccgtttctgcgcaaggcggcattaccgttgcgctgggtaatacccatgaagataactgggaatggcatatgtacgacaccgtgaaagggagcgactatatcggtgaccaggacgcgattgaatatatgtgtaaaaccgggccggaagcgattctggaactcgaacacatgggcctgccgttcagccgtctcgatgatggtcgtatctatcaacgtccgtttggcggtcagagcaaaaacttcggcggcgagcaggcggcacgcactgcggcagcagctgaccgtaccggtcacgcactgttgcacacgctttatcagcagaacctgaaaaaccacaccaccattttctccgagtggtatgcgctggatctggtgaaaaaccaggatggcgcggtggtgggttgtaccgcactgtgcatcgaaaccggtgaagtggtttatttcaaagcccgcgctaccgtgctggcgactggcggagcagggcgtatttatcagtccaccaccaacgcccacattaacaccggcgacggtgtcggcatggctatccgtgccggcgtaccggtgcaggatatggaaatgtggcagttccacccgaccggcattgccggtgcgggcgtactggtcaccgaaggttgccgtggtgaaggcggttatctgctgaacaaacatggcgaacgttttatggagcgttatgcgccgaacgccaaagacctggcgggccgtgacgtggttgcgcgttccatcatgatcgaaatccgtgaaggtcgcggctgtgatggtccgtgggggccacacgcgaaactgaaactcgatcacctgggtaaagaagttctcgaatcccgtctgccgggtatcctggagctttcccgtaccttcgctcacgtcgatccggtgaaagagccgattccggttatcccaacctgtcactacatgatgggcggtattccgaccaaagttaccggtcaggcactgactgtgaatgagaaaggcgaagatgtggttgttccgggactgtttgccgttggtgaaatcgcttgtgtaagcgtacacggcgctaaccgtctgggcggcaacagcctgctggacctggtggtctttggtcgcgcggcaggtctgcatctgcaagagtctatcgccgagcagggcgcactgcgcgatgccagcgagtctgatgttgaagcgtctctggatcgcctgaaccgctggaacaataatcgtaacggtgaagatccggtggcgatccgtaaagcgctgcaagaatgtatgcagcataacttcagcgtcttccgtgaaggtgatgcgatggcgaaagggcttgagcagttgaaagtgatccgcgagcgtctgaaaaatgcccgtctggatgacacttccagcgagttcaacacccagcgcgttgagtgcctggaactggataacctgatggaaacggcgtatgcaacggctgtttctgccaacttccgtaccgaaagccgtggcgcgcatagccgcttcgacttcccggatcgtgatgatgaaaactggctgtgccactccctgtatctgccagagagcgaatccatgacgcgccgaagcgtcaacatggaaccgaaactgcgcccggcattcccgccgaagattcgtacttactaatgcggagacaggaaaatgagactcgagtttagtatttatcgctataacccggatgttgatgatgctccgcgtatgcaggattacaccctggaagcggatgaaggtcgcgacatgatgctgctggatgcgcttatccagctaaaagagaaagatcccagcctgagcttccgccgctcctgccgtgaaggtgtgtgcggttccgacggtctgaacatgaacggcaagaatggtctggcctgtattaccccgattagcgcactcaaccagccgggcaagaagattgtgattcgcccgctgccaggtttaccggtgatccgcgatttggtggtagacatgggacaattctatgcgcaatatgagaaaattaagccttacctgttgaataatggacaaaatccgccagctcgcgagcatttacagatgccagagcagcgcgaaaaactcgacgggctgtatgaatgtattctctgcgcatgttgtagtacctcttgtccgtctttctggtggaatcccgataagtttatcggcccggcaggcttgttagcggcatatcgtttcctgattgatagccgtgataccgagactgacagccgcctcgacggtttgagtgatgcattcagcgtattccgctgtcacagcatcatgaactgcgtcagtgtatgtccgaaggggctgaacccgacgcgcgccatcggccatatcaagagcatgttgttgcaacgtaatgcgtaaaccgtaggcctgataagacgcgcaagcgtcgcatcaggcaaccagtgccggatgcggcgtgaacgccttatccggcctacaagtcattacccgtaggcctgataagcgcagcgcatcaggcgtaacaaagaaatgcaggaaatctttaaaaactgcccctgacactaagacagtttttaaaggttccttcgcgagccactacgtagacaagagctcgcaagtgaaccccggcacgcacatcactgtgcgtggtagtatccacggcgaagtaagcataaaaaagatgcttaagggatcacgatgcagaacagcgctttgaaagcctggttggactcttcttacctctctggcgcaaaccagagctggatagaacagctctatgaagacttcttaaccgatcctgacagcgttgacgctaactggcgtaacacgttccagcagttacctggtacgggagtcaaaccggatcaattccactctcaaacgcgtgaatatttccgccgcctggcgaaagacgctagtcgttactctagtacgatctccgaccctgacaccaatgtgaagcaggttaaagtcctgcagctcattaacgcataccgcttccgtggtcaccagcatgcgaatctcgatccgctgggactgtggcagcaagataaagtggccgatctggatccgtctttccacgatctgaccgaagcagacttccaggagaccttcaacgtcggtagttttgccagcggcaaagaaaccatgaaactcggcgagctgctggaagccctcaagcaaacctactgcggcccgattggtgccgagtatatgcacattaccagcaccgaagaaaaacgctggatccaacagcgtatcgagtctggtcgcgcgactttcaatagcgaagagaaaaaacgcttcttaagcgaactgaccgccgctgaaggtcttgaacgttacctcggcgcaaaattccctggcgcaaaacgcttcagcctggaaggcggtgacgcgttaatcccgatgcttaaagagatgatccgccacgctggcaacagcggcacccgcgaagtggttctcgggatggcgcaccgtggtcgtctgaacgtgctggtgaacgtgctgggtaaaaaaccgcaagacttgttcgacgagttcgccggtaaacataaagaacacctcggcacgggtgacgtgaaataccacatgggcttcagctctgacttccagaccgatggcggcctggtgcacctggcgctggcgtttaacccgtctcaccttgagattgtaagcccggtagttatcggttctgttcgtgcccgtctggacagacttgatgagccgagcagcaacaaagtgctgccaatcaccatccacggtgacgccgcagtgaccgggcagggcgtggttcaggaaaccctgaacatgagcaaagcgcgtggttatgaagttggcggtacggtacgtatcgttatcaacaaccaggttggtttcaccacctctaatccgctggatgcccgttctacgccgtactgtactgatatcggtaagatggttcaggccccgatttttcacgttaacgcggacgatccggaagccgttgcctttgtgacccgtctggcgctcgatttccgtaacacctttaaacgtgatgtcttcatcgacctggtgtgctaccgccgtcacggccacaacgaagccgacgagccgagcgcaacccagccgctgatgtatcagaaaatcaaaaaacatccgacaccgcgcaaaatctacgctgacaagctggagcaggaaaaagtggcgacgctggaagatgccaccgagatggttaacctgtaccgcgatgcgctggatgctggcgattgcgtagtggcagagtggcgtccgatgaacatgcactctttcacctggagcccgtacctcaaccacgaatgggacgaagagtacccgaacaaagttgagatgaagcgcctgcaggagctggcgaaacgcatcagcacggtgccggaagcagttgaaatgcagtctcgcgttgccaagatttatggcgatcgccaggcgatggctgccggtgagaaactgttcgactggggcggtgcggaaaacctcgcttacgccacgctggttgatgaaggcattccggttcgcctgagcggtgaagactccggtcgcggtaccttcttccaccgccacgcggtgatccacaaccagtctaacggttccacttacacgccgctgcaacatatccataacgggcagggcgcgttccgtgtctgggactccgtactgtctgaagaagcagtgctggcgtttgaatatggttatgccaccgcagaaccacgcactctgaccatctgggaagcgcagttcggtgacttcgccaacggtgcgcaggtggttatcgaccagttcatctcctctggcgaacagaaatggggccggatgtgtggtctggtgatgttgctgccgcacggttacgaagggcaggggccggagcactcctccgcgcgtctggaacgttatctgcaactttgtgctgagcaaaacatgcaggtttgcgtaccgtctaccccggcacaggtttaccacatgctgcgtcgtcaggcgctgcgcgggatgcgtcgtccgctggtcgtgatgagcccgaaatccctgctgcgtcatccgctggcggtttccagcctcgaagaactggcgaacggcaccttcctgccagccatcggtgaaatcgacgagcttgatccgaagggcgtgaagcgcgtagtgatgtgttctggtaaggtttattacgacctgctggaacagcgtcgtaagaacaatcaacacgatgtcgccattgtgcgtatcgagcaactctacccgttcccgcataaagcgatgcaggaagtgttgcagcagtttgctcacgtcaaggattttgtctggtgccaggaagagccgctcaaccagggcgcatggtactgcagccagcatcatttccgtgaagtgattccgtttggggcttctctgcgttatgcaggccgcccggcctccgcctctccggcggtagggtatatgtccgttcaccagaaacagcaacaagatctggttaatgacgcgctgaacgtcgaataaataaaggatacacaatgagtagcgtagatattctggtccctgacctgcctgaatccgtagccgatgccaccgtcgcaacctggcataaaaaacccggcgacgcagtcgtacgtgatgaagtgctggtagaaatcgaaactgacaaagtggtactggaagtaccggcaagtgcagacggcattctggatgcggttctggaagatgaaggtacaacggtaacgtctcgtcagatccttggtcgcctgcgtgaaggcaacagcgccggtaaagaaaccagcgccaaatctgaagagaaagcgtccactccggcgcaacgccagcaggcgtctctggaagagcaaaacaacgatgcgttaagcccggcgatccgtcgcctgctggctgaacacaatctcgacgccagcgccattaaaggcaccggtgtgggtggtcgtctgactcgtgaagatgtggaaaaacatctggcgaaagccccggcgaaagagtctgctccggcagcggctgctccggcggcgcaaccggctctggctgcacgtagtgaaaaacgtgtcccgatgactcgcctgcgtaagcgtgtggcagagcgtctgctggaagcgaaaaactccaccgccatgctgaccacgttcaacgaagtcaacatgaagccgattatggatctgcgtaagcagtacggtgaagcgtttgaaaaacgccacggcatccgtctgggctttatgtccttctacgtgaaagcggtggttgaagccctgaaacgttacccggaagtgaacgcttctatcgacggcgatgacgtggtttaccacaactatttcgacgtcagcatggcggtttctacgccgcgcggcctggtgacgccggttctgcgtgatgtcgataccctcggcatggcagacatcgagaagaaaatcaaagagctggcagtcaaaggccgtgacggcaagctgaccgttgaagatctgaccggtggtaacttcaccatcaccaacggtggtgtgttcggttccctgatgtctacgccgatcatcaacccgccgcagagcgcaattctgggtatgcacgctatcaaagatcgtccgatggcggtgaatggtcaggttgagatcctgccgatgatgtacctggcgctgtcctacgatcaccgtctgatcgatggtcgcgaatccgtgggcttcctggtaacgatcaaagagttgctggaagatccgacgcgtctgctgctggacgtgtaatagtttaagtttcacctgcactgtagaccggataaggcattatcgccttctccggcaattgaagcctgatgcgacgctgacgcgtcttatcaggcctacgggaccaccaatgtaggtcggataaggcgcaagcgccgcatccgacaagcgatgcctgatgtgacgtttaacgtgtcttatcaggcctacgggtgaccgacaatgcccggaagcgatacgaaatattcggtctacggtttaaaagataacgattactgaaggatggacagaacacatgaacttacatgaatatcaggcaaaacaactttttgcccgctatggcttaccagcaccggtgggttatgcctgtactactccgcgcgaagcagaagaagccgctagtaaaatcggtgccggtccgtgggtagtgaaatgtcaggttcacgctggtggccgcggtaaagcgggcggtgtgaaagttgtaaacagcaaagaagacatccgtgcttttgcagaaaactggctgggcaagcgtctggtaacgtatcaaacagatgccaatggccaaccggttaaccagattctggttgaagcagcgaccgatatcgctaaagagctgtatctcggtgccgttgttgaccgtagttcccgtcgtgtggtctttatggcctccaccgaaggcggcgtggaaatcgaaaaagtggcggaagaaactccgcacctgatccataaagttgcgcttgatccgctgactggcccgatgccgtatcagggacgcgagctggcgttcaaactgggtctggaaggtaaactggttcagcagttcaccaaaatcttcatgggcctggcgaccattttcctggagcgcgacctggcgttgatcgaaatcaacccgctggtcatcaccaaacagggcgatctgatttgcctcgacggcaaactgggcgctgacggcaacgcactgttccgccagcctgatctgcgcgaaatgcgtgaccagagccaggaagatccgcgtgaagcacaggctgcacagtgggaactgaactacgttgcgctggacggtaacatcggttgtatggttaacggcgcaggtctggcgatgggtacgatggacatcgttaaactgcacggcggcgaaccggctaacttccttgacgttggcggcggcgcaaccaaagaacgtgtaaccgaagcgttcaaaatcatcctctctgacgacaaagtgaaagccgttctggttaacatcttcggcggtatcgttcgttgcgacctgatcgctgacggtatcatcggcgcggtagcagaagtgggtgttaacgtaccggtcgtggtacgtctggaaggtaacaacgccgaactcggcgcgaagaaactggctgacagcggcctgaatattattgcagcaaaaggtctgacggatgcagctcagcaggttgttgccgcagtggaggggaaataatgtccattttaatcgataaaaacaccaaggttatctgccagggctttaccggtagccaggggactttccacagtgaacaggccattgcatacggcactaaaatggttggcggcgtaaccccaggtaaaggcggcaccacccacctcggcctgccggtgttcaacaccgtgcgtgaagccgttgctgccactggcgctaccgcttctgttatctacgtaccagcaccgttctgcaaagactccattctggaagccatcgacgcaggcatcaaactgattatcaccatcactgaaggcatcccgacgctggatatgctgaccgtgaaagtgaagctggatgaagcaggcgttcgtatgatcggcccgaactgcccaggcgttatcactccgggtgaatgcaaaatcggtatccagcctggtcacattcacaaaccgggtaaagtgggtatcgtttcccgttccggtacactgacctatgaagcggttaaacagaccacggattacggtttcggtcagagcacctgtgtcggtatcggcggtgacccgatcccgggctctaactttatcgacattctcgaaatgttcgaaaaagatccgcagaccgaagcgatcgtgatgatcggtgagatcggcggtagcgctgaagaagaagcagctgcgtacatcaaagagcacgttaccaagccagttgtgggttacatcgctggtgtgactgcgccgaaaggcaaacgtatgggccacgcgggtgccatcattgccggtgggaaagggactgcggatgagaaattcgctgctctggaagccgcaggcgtgaaaaccgttcgcagcctggcggatatcggtgaagcactgaaaactgttctgaaataaatatctgtaataagaaatagccctcgccgcttccctctacaggaatggcgaagggctgtcggtttcgacatggttggccatcgtatgatggccttttttgtgcttatcggctactttttcgctgcgctatcagggtaaatttatagtcatcggtattaaaagcgttgcggctatattcaaacacccgaccatcaactaaatatccacggcttactttttcaagaatcggctttgtctggctgatattaagcagacggctcatctcttcggttggcatcagaggaatgatttcctgttcgctacgatcgataaccattttcttcacttcttcgataaagtgatatttgctattttccatgacctgccaggtgagatccgggaacaacgcaagcggcatccaggtttcttccagcgccattggcttttgcttgcgatagcgcacgcgcttcacatgccacacacgatcctgcggggtgatttgtagctgttgctgaagaaaatcgtcagccggaatcacttcgaatatcagaacttcactgtgtgtatcgacgtgacggtcgctcagtttttcatcaaaactggttaactgaaaaatatcgtaattgacccgctcttctttgacgtaagtcccgctgccctgaatgctttcgaggatctgctgctcgactagctggcgcaaagcctgacgcaccgtaacccggctgacgccaaactctgtttgtagcgcactttcagtgggtaacgcatcgccaggtttaagctcgccacgcgcaatttgttcacgaatgcgatcggcaatctgccggtataagggcttgtgtcccatttttagtatctcattaatacgaatttaaccattatgcccgataaattcatcctgtaaataatacaaatacaatacaaataatttcaatcaagtgaaattgatcacataatggtattgttttatcgggcacactggcgcgactataaaaacgatcaagtgaggatcatgatgaatctgacgactctgacccaccgcgatgcgttgtgtctgaatgcgcgctttaccagccgtgaagaggccatccacgcgttgactcaacgtcttgctgctctggggaaaatttccagtactgagcaatttctggaagaagtgtatcgccgtgaaagccttggcccgaccgccttaggtgaagggttggctgtgccgcatggcaaaactgctgcggtaaaagaagcggcgtttgcggtcgccacactcagcgagccgcttcagtgggaaggcgttgatggcccggaagcagttgatttagtggtgctgctggcgattccccccaatgaagcgggtactacgcatatgcaactgctgacagcgctgaccacgcgccttgcggatgatgagattcgggcgcgtatacagagcgcgacgacgcctgatgagttgctcagcgcgctggatgacaagggaggcacgcaaccttctgcctctttttccaacgcgccaactatcgtctgcgtaacggcctgtccggcgggtattgctcacacctatatggctgcggaatatctggaaaaagccggacgcaaactcggcgtaaatgtttacgttgaaaaacaaggcgctaacggcattgaagggcgtttaacggcggatcaactcaatagtgcaaccgcctgtatttttgcggctgaagtcgccatcaaggagagtgagcgttttaatggcattcccgcgcttagtgtgcctgttgccgagccgattcgccatgcagaagcgttgatccaacaagcgcttaccctcaagcgtagcgatgagacgcgtaccgtacagcaagatacgcaaccggtgaaaagtgtcaaaacggagctgaaacaggcactgttgagcggaatctcttttgccgtaccgttgattgtcgcggggggcacggtgctggcggtcgcggtattactgagccaaatcttcgggctacaagatctgtttaatgaagaaaactcctggctgtggatgtaccgcaagctgggcggcgggctgctcggaattttgatggtaccggtgctcgcggcctataccgcctattctctggcagataaaccggcgttagcgccaggctttgcggctggacttgccgccaacatgatcggctccgggtttctcggcgcggtcgttggcggattgatagccggttacttgatgcgctgggtgaaaaatcacttgcgtcttagcagtaaattcaatggattcctgactttttatctctacccggtgctcggtacgttgggagcgggcagtctgatgctgtttgtggtgggggaacctgtcgcctggatcaataacagccttaccgcctggctgaacggtctgagtggaagtaacgcgctgttgctgggtgccattctcggttttatgtgttcctttgaccttggagggccagtgaataaagccgcttatgcattctgcctgggcgcaatggcgaacggcgtttacggcccgtatgccattttcgcctccgtcaaaatggttagcgcatttaccgtaaccgcttccacgatgctcgcaccgcgcctgtttaaagagtttgaaattgagaccgggaaatccacctggctgttagggctggcaggtattaccgaaggggcgatcccgatggcgattgaagatccgctgcgggttattggtagctttgtgctgggctctatggtaacgggcgctattgtcggtgcgatgaatatcggccttagcacacccggtgccggcattttcagcctctttttacttcatgataatggcgcgggcggtgttatggcggcaattggctggtttggcgcggcattggtgggggctgcaatcagcactgcaattctcctgatgtggcggcgtcacgcggttaagcatggcaactatctgactgatggcgtaatgccataaacaaaaaggaaacgacgatgaaagcagtatctcgcgttcacatcaccccgcatatgcactgggatcgagagtggtatttcaccaccgaagagagtcgtattctgctggtcaataatatggaagagatcctgtgccgactggaacaggacaacgaatacaaatattacgtactcgacgggcaaacggcgatcctcgaagattatttcgcggtgaaaccggaaaacaaagaccgtgtgaagaaacaggtagaagccggcaagttgattatcggcccctggtatacccagaccgataccacgattgtttctgcggaatccatcgtccgtaatctgatgtacggaatgcgtgactgcctcgcgtttggcgagccgatgaaaataggttatttaccagattcctttggcatgtccgggcaactgccgcatatctacaatggatttggcattacccgcaccatgttctggcgcggatgtagcgagcgccacggtactgataaaaccgagtttttgtggcaaagcagtgacggtagcgaagtgacggcgcaggtgctgccgctgggctacgccatcggtaagtacttacctgccgacgaaaacggattacgtaaacgcctcgacagttattttgacgtgctggaaaaagcgtctgtaaccaaagagattttgctgccgaatgggcatgaccagatgccattgcagcaaaatatcttcgaagtgatggataagctacgtgagatctaccctcaacgtaagtttgtgatgagccgctttgaagaggtatttgagaagatcgaagcgcagcgagataatctggcaaccctgaaaggggaatttattgatggcaaatatatgcgcgtgcatcgcaccatcggttctacgcgtatggatatcaaaattgcccacgcgcgtattgaaaataagattgttaatctgctggaaccgctggcaacactggcctggacgttgggttttgaataccaccacggcttgctggagaaaatgtggaaagagatcttaaaaaatcatgcccacgacagtatcggctgctgctgtagtgacaaagttcatcgcgaaatcgtcgcccgcttcgaactggctgaagacatggcggataatctgattcgtttctacatgcgcaaaattgccgacaacatgccgcagagcgacgccgacaaactcgtcctgtttaacctgatgccctggccgcgtgaagaagttatcaacaccactgtgcggctgcgcgccagccagtttaatttgcgggacgatcgcggtcagcctgtaccgtattttattcgccatgcccgtgagatcgatccaggcctaatcgatcggcaaatagttcattacggtaattacgatccctttatggagtttgatatacagatcaaccagattgtcccttctatgggctatcgcacgctttatatcgaagcgaatcagcctggcaacgtaattgcggcaaaaagtgacgctgaagggatactggaaaatgctttctggcaaattgcgctcaatgaggatggttctctgcaactggtagataaagacagcggtgtgcgctatgaccgggtattgcaaattgaagaaagctctgatgatggtgatgaatatgactatagtcccgcaaaagaagagtgggtaattaccgcagcgaacgcgaaaccgcaatgcgatattattcatgaagcctggcagagcagggctgttatccgctatgacatggcagtgccgctcaatttgagtgaacgcagcgcccggcaatccactggcagagtaggggtggtgttggttgtcactcttagtcataacagcaggcgtattgatgtggatatcaatcttgataaccaggctgacgatcatcgccttcgtgtcctggtccctacaccttttaacaccgacagtgttctggcagatacgcagtttggtagcctaacgcgccccgtgaacgacagtgcaatgaacaactggcagcaagaaggctggaaagaagcgccggttccggtatggaatatgctcaactatgttgccttacaggaagggcgtaacggcatggctgtctttagcgaagggttacgtgaatttgaagtcatcggtgaagagaagaaaacctttgccattacgttgctgcgtggcgtgggcttactgggcaaagaagatctgcttttaaggcctgggcggcctagcggaattaaaatgccagtcccggacagtcaactacgtggtctgctttcttgtcgcctaagtttattgagttataccggtacgccaaccgccgctggtgtagctcagcaggcgcgagcatggctgactccagtacagtgttacaacaaaatcccatgggatgtgatgaagctcaacaaagccggattcaacgtgccggaaagttatagtttgttgaaaatgcccccagtgggatgcctgataagcgcacttaagaaagctgaagaccgacaagaagtgattttacggctgtttaatccggctgaaagtgcaacctgtgatgcgactgttgctttcagtcgcgaggtgatttcttgcagtgaaacgatgatggatgaacacattaccaccgaggaaaatcaaggtagtaatctaagcgggccttttttacccggccagagtcggacgttcagttaccggcttgcctgaatagcaatcaaaccgaagccacatatgcgcggccagattgttgacaaagggcgctttgttcatgccggatacggcatgaacgctttattcggtctacaaaagcaggcaaattcaatatattgcagagatgatgtagacactggcaagcgtagcgcatcaggtaattttgcgtttatcttcactctcaagccacgtatatgtggctttatttttaacaaaataataaccctgggtgagttaattataatataattataagttaactaaatgttaatattggcggggtggatttatgcctttattagtaatcctgaaactctgcgtcgtattagccagtgaccaaaaaaagaattaaggtcaaccgtgctgtttttgcttcgtctctttttatctttaattgccaaccgaaactaatttcagccttataactcacacattttaaacataaatgtcactaaagttaccttattgaaacatgattaacataatttgtaggaattgatatttatcaatgtataagtcttggaaatgggcatcaaaaagagataaattgttctcgatcaaattggctgaaaggcggtaatttagctataaattgatcaccgtcgaaaaatgcaaatttgcttcaacaaaaacctgtttattgtaaggattttgcggcgtaatatatacgtgggatcaatttgagtttttattaacatgtttgcaacctttctttacgccgtttttgtgtgcattcacatggtatgatgaaagtgttcaaacaaatttctattggggcatgcgtgtgaccctttctaacggggttcactctcggagtcttcatgcgatgagcaaggagtcatgatgttagatatagtcgaactgagccgcttacagtttgccttgaccgcgatgtaccacttcctttttgtgccactgacgctcggtatggcgttcctgctggccattatggaaacggtctacgtcctctccggcaaacagatttataaagatatgaccaagttctggggcaagttgtttggtatcaacttcgctctgggtgtggctaccggtctgaccatggagttccagttcgggactaactggtcttactattcccactatgtaggggatatcttcggtgcgccgctggcaatcgaaggtctgatggccttcttcctcgaatccacctttgtaggtctgttcttcttcggttgggatcgtctgggtaaagttcagcatatgtgtgtcacctggctggtggcgctcggtagtaacctgtccgcactgtggattctggttgcgaacggctggatgcaaaacccaatcgcgtccgatttcaactttgaaactatgcgtatggagatggtgagcttctccgagctggtgcttaacccggttgctcaggtgaaattcgttcacactgtagcgtctggttatgtgactggcgcgatgttcatcctcggtatcagcgcatggtatatgctgaaaggtcgtgacttcgccttcgctaaacgctcctttgctatcgctgccagcttcggtatggctgctgttctgtctgttattgttctgggtgatgaatccggctacgaaatgggcgacgtgcagaaaaccaaactggctgctattgaagccgagtgggaaacgcaacctgcgcctgctgcctttactctgttcggcattcctgatcaggaagaggagacgaacaaatttgcgattcagatcccttacgcactgggcatcattgcaacgcgttccgtggataccccggttatcggcctgaaagagctgatggtgcagcatgaagaacgcattcgtaacgggatgaaggcgtactctctgctcgaacaactgcgttctggttctaccgaccaggcggttcgtgaccagttcaatagcatgaagaaagacctcggttacggtctgctgctgaaacgctatacgccaaacgtggctgatgcgactgaagcgcagattcaacaggcaaccaaagactccatcccgcgtgtagcgccgctgtactttgcgttccgtatcatggtggcgtgtggcttcctgcttctggcaatcatcgcgctctctttctggagtgtcatccgcaaccgcattggcgagaaaaaatggcttctgcgcgccgcgctgtacggtattccgctgccgtggattgctgtagaagcgggctggttcgtggctgaatatggccgccaaccgtgggctatcggtgaagtgctgccgacagctgtggcgaacagcagtctgaccgcaggcgatctcatcttcagtatggtgctgatttgcggcctgtataccctgttcctggtggcagaattgttcttaatgttcaagtttgcacgcctcggcccaagcagcctgaaaaccggtcgctatcactttgagcagtcttccacgactactcagccggcacgctaagacaggagtcgtcaaatgatcgattatgaagtattgcgttttatctggtggctgctggttggcgttctgctgattggttttgcagtcactgacggtttcgacatgggggtgggcatgctcacccgtttcctcggtcgtaacgacaccgagcgtcgaattatgattaactccattgcaccacactgggacggtaaccaggtttggctgatcaccgcgggcggcgcactctttgctgcctggccgatggtctatgccgctgcgttctccggcttctatgtggcgatgatcctcgtgctggcgtctttgttcttccgtccggtcggttttgactaccgctccaagattgaagaaacccgctggcgtaacatgtgggactggggcatcttcattggtagcttcgttccgccgctggtaattggtgtagcgttcggtaacctgttgcagggcgtaccgttcaacgttgatgaatatctgcgtctgtactacaccggtaacttcttccagttgcttaacccgttcggcctgctggcaggcgtggtgagcgtagggatgatcattactcagggcgcaacctatctgcaaatgcgtaccgtgggcgaactgcacctgcgtacccgtgcaacggctcaggtggctgcgctggtgacactggtctgtttcgcactggctggcgtatgggtgatgtacggtatcgatggttatgtcgtgaaaagcacaatggaccattacgcagcctctaacccactgaataaagaagtggttcgtgaagctggcgcatggctggttaacttcaacaacacgccaattctgtgggctattccggcactgggtgtggttctgccgctgctgaccatcctgactgcacgtatggataaagccgcgtgggcgtttgtgttctcctccctgacgctggcctgcatcatcctgacagccggtatcgcaatgttcccgtttgtgatgccgtccagcaccatgatgaacgcaagtctgacaatgtgggatgcaacttccagccagctgacgcttaacgtcatgacctgggttgcggtggttctggtaccgatcattctgctctacaccgcctggtgttactggaaaatgttcggtcgtatcaccaaagaagatattgaacgtaacacccactctctgtactaagtaaggagctaaaaatgtggtatttcgcatggattctgggaacgcttcttgcctgtagctttggggtaatcaccgcgctggcgcttgaacacgtcgaaagtggcaaagccggtcaagaagacatctgatgagtaagattatcgcgactttgtatgcggtaatggacaagcgccccctgcgggcgctttccttcgtgatggcgcttctgttagcaggatgtatgttttgggacccatctcgttttgccgcgaagaccagtgaactggaaatctggcatggtttattgctgatgtgggccgtctgtgctggtgtgattcacggcgtgggctttcgtccgcagaaggttctttggcaagggattttttgcccattgcttgccgatattgttctcattgtcgggctgattttcttcttcttttaaatcagaattctctttaaaaaattatgggccgctccaggcccataaatttttacgctcccttaacttgccctcattcccaaacctcaatcgcgcgcgtatagtagcagcgtttaaaagctctaacttttgttgcattaccgggatgtaaagtgaatacaacgctgtttcgatggccggttcgcgtctactatgaagataccgatgccggtggtgtggtgtaccacgccagttacgtcgctttttatgaaagagcacgcacagagatgctgcgtcatcatcacttcagtcagcaggcgctgatggctgaacgcgttgcctttgtggtacgtaaaatgacggtggaatattacgcacctgcgcggctcgacgatatgctcgaaatacagactgaaataacaagtatgcgtggcacctctttggttttcacgcaacgtattgtcaacgccgagaatactttgctgaatgaagcagaggttctggttgtttgcgttgacccactcaaaatgaagcctcgtgcgcttcccaagtctattgtcgcggagtttaagcagtgactgacatgaatatccttgatttgttcctgaaggctagccttctggttaaacttatcatgttgattttgattggttttagtatcgcatcttgggccattattatccagcggacccgtattcttaacgcagcggcgcgcgaagccgaagcgtttgaagataaattctggtctggaatcgaactctctcgcctctatcaagagagccaggggaaacgggataatctgactggtagcgaacaaatcttttacagcgggttcaaagagtttgtgcgcctgcatcgtgccaatagccatgcgccggaagccgtagtggaaggggcgagccgtgctatgcgtatctccatgaaccgtgaacttgaaaatctggaaacgcacattccgttcctcggtacggttggctccatcagcccgtatattggtctgtttggtacggtctgggggatcatgcacgcctttatcgccctcggggcggtaaaacaagcaacactgcaaatggttgcgcccggtatcgcagaagcgttgattgcgactgcaattggtctgtttgccgctatcccggcagttatggcctacaaccgcctcaaccagcgcgtaaacaaactggaactgaattacgacaactttatggaagagtttaccgcgattctgcaccgccaggcgtttaccgttagcgagagcaacaaggggtaagccatggccagagcgcgtggacgaggtcgtcgcgatctcaagtccgaaatcaacattgtaccgttgctggacgtactgctggtgctgttgctgatctttatggcgacagcgcccatcatcacccagagcgtggaggtcgatctgccagacgctactgaaagtcaggcggtgagcagtaacgataatccgccagtgattgttgaagtgtctggtattggtcagtacaccgtggtggttgagaaagatcgcctggagcgtttaccaccagagcaggtggtggcggaagtgtccagccgtttcaaggccaacccgaaaacggtctttctgatcggtggcgcaaaagatgtgccttacgatgaaataattaaagcactgaacttgttacatagtgcgggtgtgaaaagcgttggtttaatgacgcagcctatctaaacatctgcgtttcccttgcttgaaagagagcgggtaacaggcgaacagtttttggaaaccgagagtgagtaaggcaaccgaacaaaacgacaagctcaagcgggcgataattattagtgcagtgctgcatgtcatcttatttgcggcgctgatctggagtagcttcgatgagaatatagaagctagtgccggaggcggcggtggtagctccatcgacgctgtcttggttgatagtggtgcggtagttgagcagtacaaacgcatgcaaagccaggaaagtagcgcgaagcgttctgatgaacagcgcaagatgaaggaacagcaggctgctgaagaactgcgtgagaaacaagcggctgaacaggaacgcctgaagcaacttgagaaagagcggttagcggctcaggagcagaaaaagcaggctgaagaagccgcaaaacaggccgagttaaagcagaagcaagctgaagaggcggcagcgaaagcggcggcagatgctaaagcgaaggccgaagcagatgctaaagctgcggaagaagcagcgaagaaagcggctgcagacgcaaagaaaaaagcagaagcagaagccgccaaagccgcagccgaagcgcagaaaaaagccgaggcagccgctgcggcactgaagaagaaagcggaagcggcagaagcagctgcagctgaagcaagaaagaaagcggcaactgaagctgctgaaaaagccaaagcagaagctgagaagaaagcggctgctgaaaaggctgcagctgataagaaagcggcagcagagaaagctgcagccgacaaaaaagcagcagaaaaagcggctgctgaaaaggcagcagctgataagaaagcagcggcagaaaaagccgccgcagacaaaaaagcggcagcggcaaaagctgcagctgaaaaagccgctgcagcaaaagcggccgcagaggcagatgatattttcggtgagctaagctctggtaagaatgcaccgaaaacggggggaggggcgaaagggaacaatgctagccctgccgggagtggtaatactaaaaacaatggcgcaagtggggccgatatcaataactatgccgggcagattaaatctgctatcgaaagtaagttctatgacgcaagctcctatgcaggcaaaacctgtacgctgcgcataaaactggcacccgatggtatgttactggatatcaaacctgaaggtggcgatcccgcactttgtcaggctgcgttggcagcagctaaacttgcgaagatcccgaaaccaccaagccaggcagtatatgaagtgttcaaaaacgcgccattggacttcaaaccgtaatcgcgatgttgactgttcggacggtcaacatcaggcaccggttgccacggggttctggtagttttgtgtattttagtttgttaacattctgctaaattatcgtgggccatcggtccagataagggagatatgatgaagcaggcattacgagtagcatttggttttctcatactgtgggcaagtgttctgcatgctgaagtccgcattgtgatcgacagcggtgtagattccggtcgtcctattggtgttgttcctttccagtgggcggggcctggtgcggcacctgaagatattggcggcatcgttgctgctgacttgcgtaacagcggtaaatttaatccgttagatcgcgctcgtctgccacagcagccgggtagtgcgcaggaagtacaaccagctgcatggtccgcactgggcattgacgctgtagttgtcggtcaggtcactccgaatccggatggttcttacaatgttgcttatcaacttgttgacactggcggcgcaccgggtactgtacttgctcagaacagctacaaagtgaacaagcagtggctgcgttatgctggtcataccgccagtgatgaagtgtttgaaaaactgaccggcattaaaggtgcgttccgtactcgtattgcctacgttgttcagaccaacggcggtcagttcccgtatgaactgcgcgtatctgactatgacggttacaaccagtttgtcgttcaccgtagtccgcagccgctgatgtctccggcgtggagtccagacggttctaaactggcttatgtgaccttcgaaagcggtcgttccgcgctggttattcagacgctggcaaatggcgctgtacgtcaggtggctagtttcccgcgtcacaacggtgcacctgcattcagcccagacggcagcaaactggcattcgccttgagcaaaaccggtagtctgaacctgtacgtaatggatttggcttctggtcagatccgccaggtgactgatggtcgcagtaacaataccgaaccgacctggttcccggatagccagaacctggcatttacttctgaccaggccggtcgtccgcaggtttataaagtgaatatcaacggcggtgcgccacaacgtattacctgggaaggtagccagaaccaggatgcggatgtcagcagcgacggtaaatttatggtaatggtcagctccaatggtgggcagcagcacattgccaaacaagatctggcaacgggaggcgtacaagttctgagctccacgttcctggatgaaacgccaagtctggcacctaacggcactatggtaatctacagctcttctcaggggatgggatccgtgctgaatttggtttctacagatgggcgtttcaaagcgcgtcttccggcaactgatggacaggtcaaattccctgcctggagcccgtatctgtgataataattaattgaatagtaaaggaatcattgaaatgcaactgaacaaagtgctgaaagggctgatgattgctctgcctgttatggcaattgcggcatgttcttccaacaagaacgccagcaatgacggcagcgaaggcatgctgggtgccggcactggtatggatgcgaacggcggcaacggcaacatgtcttccgaagagcaggctcgtctgcaaatgcaacagctgcagcagaacaacatcgtttacttcgatctggacaagtacgatatccgttctgacttcgctcaaatgctggatgcacatgcaaacttcctgcgtagcaacccgtcttacaaagtcaccgtagaaggtcacgcggacgaacgtggtactccggaatacaacatctccctgggtgaacgtcgtgcgaacgccgttaagatgtacctgcagggtaaaggcgtttctgcagaccagatctccatcgtttcttacggtaaagaaaaacctgcagtactgggtcatgacgaagcggcatactccaaaaaccgtcgtgcggtactggtttactaagagaattgcatgagcagtaacttcagacatcaactattgagtctgagcttactggttggtatagcggccccctgggccgcttttgctcaggcaccaatcagtagtgtcggcagtggcagcgtcgaagaccgcgtcactcaacttgagcgtatttctaatgctcacagccagcttttaacccaactccagcaacaactttctgataatcaatccgatattgattccctgcgtggtcagattcaggaaaatcagtatcaactgaatcaggtcgtggagcggcaaaagcagatcctgttgcagatcgacagcctcagcagcggtggtgcagcggcgcaaagtaccagcggcgatcaaagcggtgcggcggcaagtacgacgccgacagctgatgctggtactgcgaatgctggcgcgccggtgaaaagcggtaatgcaaacacggattacaatgcagctattgcgctggtgcaggataaatcccgccaggatgacgcaatggtggcatttcagaatttcatcaaaaattaccctgatagtacttacctgccaaacgccaattattggctgggtcagttaaactacaacaagggtaaaaaagatgatgcggcgtactattttgctagcgtagtgaaaaactatccgaagagtccaaaggctgcagatgcgatgtttaaagtcggcgtcatcatgcaggacaaaggtgacaccgcaaaagcgaaagccgtataccagcaggttatcagtaaataccctggtactgatggcgctaaacaggcacaaaaacgtctgaacgcgatgtaatgcataacacacgaccagaagtcgcattatttctggtcgtgtcgtgcgaatcataagcagttgagtgatctacatcgaaatttttgttgcgctcaagtctgaaatcagtaatatatgccgccgttgccacgggatatcaaacaaaccgaaagcaacgaaaaagtgggtcgttagctcagttggtagagcagttgacttttaatcaattggtcgcaggttcgaatcctgcacgacccaccaatcgctaaggtggaagcggtagtaaaacgtgaaggataacgttgcatgagcaacggcccgaagggcgagacgaagtcgagtcatcctgcacgacccaccactaacatagttagttgtagtatccagcgtagtatcgggtgattagctcagctgggagagcacctcccttacaaggagggggtcggcggttcgatcccgtcatcacccaccaccgggtcgttagctcagttggtagagcagttgacttttaatcaattggtcgcaggttcgaatcctgcacgacccaccagttttaacatcgaagacagatgttaagcgtgtaggataacgttgcgtcagcaacggcccgtagggcgagcgaagcgagtcatcctgcacgacccaccactaatgacggtgggttcggtggaagtagtttgtagtatccagcgcagtatcgggtgattagctcagctgggagagcacctcccttacaaggagggggtcggcggttcgatcccgtcatcacccaccactcgggtcgttagctcagttggtagagcagttgacttttaatcaattggtcgcaggttcgaatcctgcacgacccaccagttttaacatcaaactcagatgttaagcgtgaaggataacgttgcgccagcaacggcccgtagggcgagcgaagcgagtcatcctgcacgacccaccaatcttaaagattggccccgagtaaaaatctttcaggtaacacccgtatgggtcgttagctcagttggtagagcagttgacttttaatcaattggtcgcaggttcgaatcctgcacgacccaccaatttaaaggtggttactggtagagaacgtgaaggataacgttgcgttagcaacggcccgaagggcgagacgaagtcgagtcatcctgcacgacccaccatcctgaatgattaaggcagcataatcccgcaaggggtcgttagctcagttggtagagcagttgacttttaatcaattggtcgcaggttcgaatcctgcacgacccaccaatgtaaaaaagcgccctaaaggcgcttttttgctatctgcgatactcaaagattcgaacctgcagcaggtttgagttgagcgcagcgaaacaacggagccgctcgcggcgacggcccgaagggcgagcgaagcgagtcatcctgcacgacccaccaatgtaaaaaagcgccctaaaggcgcttttttgctattcaggcatcctcaatttcactttgtaaacctgatgacatcgtcagagcttactgtgcaagcaactctatgtcggtggaattaggcgtaaaatgacgcatcctgcacattaggcgtaattcgagtgacttttccccaccattcgactatcttgtttagcatataaaacaaattacaccgataacagcgaatattacgctaatgtcggttttaacgttaagcctgtaaaacgagatggtaagatgagcgtaatgtttgatccagacacggcgatttatcctttccccccgaagccgacgccgttaagcattgatgaaaaagcgtattaccgcgagaagataaaacgtctgctaaaagaacgtaatgcggtgatggttgcccactactataccgatcccgaaattcaacaactggcagaagaaaccggtggctgtatttctgattctctggaaatggcgcgcttcggtgcaaagcatcccgcttctactttgttagtcgctggggtgagatttatgggagaaaccgccaaaattctcagtccggaaaaaacaattctgatgccgacacttcaggctgaatgtagtctggatctcgactgccctgttgaagaatttaacgcattttgcgatgcccatcccgatcgtactgtcgtcgtctacgccaacacttctgctgcggtaaaagcgcgcgcagattgggtggtaactagtagcattgccgtcgaacttattgatcatcttgatagtttgggtgaaaaaatcatctgggcacccgacaaacatctggggcgttacgtgcaaaaacagacgggtggagacattctatgctggcagggtgcctgtattgtgcatgatgaatttaagactcaggcgttaacccgcttgcaagaagaatacccggatgctgccatactggtgcatccagaaagtccacaagctattgtcgatatggcggatgcggtcggttccaccagtcaactgatcgctgctgcgaaaacattgccacatcagaggcttattgtggcaaccgatcggggtattttctacaaaatgcagcaggcggtgccagataaagagttactggaagcaccaaccgcaggtgagggtgcaacctgccgcagctgcgcgcattgtccgtggatggccatgaatggccttcaggccatcgcagaggcattagaacaggaaggaagcaatcacgaggttcatgttgatgaaaggctgcgagagagggcgctggtgccgctcaatcgtatgctggattttgcggctacactacgtggataacgaataataaggcgtaacgttacgctttgggggaaagatggatttttttagtgtgcagaatatcctggtacatataccaataggggcaggcggttatgatctcagttggatcgaagcggtaggcacgatcgccgggttgctgtgtattggccttgccagtctggagaagatcagcaactacttctttggcctgatcaacgtcaccttgtttggcattattttctttcagattcagctgtatgccagcctgctattacaggtgtttttctttgccgcgaatatttacggttggtatgcgtggagccgacaaaccagtcagaacgaggcggagttgaaaattcgctggttgccattgccgaaggcactcagctggttggcggtttgcgttgttagcattggtctgatgacggtatttatcaatccggtgtttgcatttttgacccgcgtggcagtcatgatcatgcaagcattaggattacaggttgtgatgcctgaactgcaaccggacgctttcccgttctgggatagttgcatgatggtgttatctatcgtggcaatgattctgatgacgcgtaagtatgtggaaaactggctgttgtgggtgattattaacgtgattagcgtcgttatttttgcacttcagggcgtttacgccatgtctctggagtacatcatcctgacctttattgcgctcaacggcagccggatgtggatcaacagcgcacgtgaaagaggcagtcgcgcgctgtcccattaatggtgatgatgactatggccagacaccccttcattcaggtggcagtctggcccatgacaaggttgatattccatctgaatggtggcgtgctcaatctgatagtgatccatcaggtagtgttggatctgatccaacaaggcatcgtgatcgtgtggcgggatcacctgcacatgcaacgtcatcaccggcttctcgcctaccatccatacatgtacatggtgcacattgcggacttccgggatttcccggcacatacgacgcttcagttcagcgatatccaggcttaccggtgcaccttcaagtaattcattcacgctatctttcaacagtcgccacgcgctacgcagaaccagaaggctcaccagtatgctgagaatggggtcagcaggtgtccagccagtccagataataatcaacgcggcaataatagccccaacgctacccagcaggtccccgagcacatgcagtgccgctgctcgtacgttgaggtttttctcttcgctgccgtgatgaagtaaccagaaagaaagtatatttgccagcaacccagccacggcaattgccatcatcatgccgccctcgaccggacgcggcgtgcggaagcgttctatcgcctcccagacaatcaaaatggtaattaccacgagggctatggcattcacaaacgccgcgagcgtggtcagtcttagccaaccgaaagtgtggcgaatggtgggaggacgacgactaaattgcacggcgagtagggcgaaaagcagggcggcagtatcggtcaacatatgacccgcatcggccagcaatgccagagaaccagaaagaaaaccaccaacgacttctaccagcataaacccggcagtcacgccgaaagcatacaacaagcgacgagcattattatcttctggcaggtgactggacgtgtgactgtgactgtgcgccatgacgagtcatcccttaattattctcacttaactttatgacatcatactgcttttagaagtgaaaaattaaaagggagagactccgctctcccattattggctattttgcagggttactgcgtggtaccgtcggttttggtatcgacatcattattgatgccatcaccggtttgtacctttttattgatatccggacagcgaccatctttgcacatggtgttcttgtgctcttcatctttggtcattccgtcattgttcatactagaaccatcgctatgcagcattgtgccgccagaaccggtatttaccccgttattgtcgacgttatttggcgcgacattttcacgggcgtcaggggctacctggcccgcatcagctgcggcgtttgcctggccgttattagtttgcgctccgctatcggcagccagtgcggcaccgctggcaaggcttagagtggcagtcagaaataatgtggccagttttgtcattttcataggatgctcctgttatggtcgttatgtcggataacctcttccaacagtgcatttgcaggtgaatataaggcattggtttaagatttcagccaggttatgaaacgcagcagagaatcttgaaataattaacaaacaaaggagttacagttagaaattgtaggagagatctcgtttttcgcgacaatctggcgtttttcttgctaattccaggattaatccgttcatagtgtaaaaccccgtttacacattctgacggaagatatagattggaagtattgcattcactaagataagtatggcaacactggaacagacatgaattatcagaacgacgatttacgcatcaaagaaatcaaagagttacttcctcctgtcgcattgctggaaaaattccccgctactgaaaatgccgcgaatacggttgcccatgcccgaaaagcgatccataagatcctgaaaggtaatgatgatcgcctgttggttgtgattggcccatgcagtattcatgatcctgtcgcggcaaaagagtatgccactcgcttgctggcgctgcgtgaagagctgaaagatgagctggaaatcgtaatgcgcgtctattttgaaaagccgcgtaccacggtgggctggaaagggctgattaacgatccgcatatggataatggcttccagatcaacgacggtctgcgtatagcccgtaaattgctgcttgatattaacgacagcggtctgccagcggcaggtgagtttctcgatatgatcaccccacaatatctcgctgacctgatgagctggggcgcaattggcgcacgtaccaccgaaagccaggtgcaccgcgaactggcaagtgggctttcttgtccggtcggcttcaaaaatggcaccgacggtacgattaaagtggctatcgatgccattaatgccgccggtgcgccgcactgcttcctgtccgtaacgaaatgggggcatagcgcgattgtgaataccagcggtaacggcgattgccatatcattctgcgcggcggtaaagagcctaactacagcgcgaagcacgttgctgaagtgaaagaagggctgaacaaagcaggcctgccagcacaggtgatgatcgatttcagccatgctaacagctccaaacaattcaaaaagcagatggatgtttgtgctgacgtttgccagcagattgccggtggcgaaaaggccattattggcgtgatggtggaaagccatctggtggaaggcaatcagagcctcgagagcggggagccgctggcctacggtaagagcatcaccgatgcctgcatcggctgggaagataccgatgctctgttacgtcaactggcgaatgcagtaaaagcgcgtcgcgggtaaggtttaattgtcggatgcgccgtcagagtggcgtatccgatgaatcaccacaggcctgataagtcgcgcagcgtcgcatcaggcaatgtgctccattgttagcaacaaaaaagccgactcacttgcagtcggctttctcattttaaacgaatgacgtttacttcgctttaccctggtttgcaaccgccgctgctttcgctgcgatctcgtcagcattacccagataatagcgtttcagcggtttgaaattctcgtcgaactcatacaccagcggcacgccagtcgggatattaagctcaagaatctcttcttcgctcatgttatcaagatatttcaccagcgcacgtaaagagttaccgtgtgcagcgatgatcacgcgctcaccgctcttcatacgcggcagaatagtttcattccagtaagggatcacgcggtcaatggtcagcgccaggctttccgtcagcggcagttctttctcgctcagtttcgcgtaacgcggatcgtgacccggataacgctcatcatctttagtcagttccggcggagtcactgcaaaaccacgacgccactgtttcacctgctcgtcgccatacttttcagcagtttccgctttgttcagaccctgcaacgcaccgtagtgacgttcgttcagtttccaggatttctcaacgggcagccatgcctgatccagttcgtccagcacattccacagggtatggatagcgcgtttcagcacagaagtgtaagcaaagtcaaagctgtaaccttcctctttcagcagcttacctgctgcttttgcttcgcttacgcctttctcagacagatccacgtcgtaccaaccggtgaaacggttttctttgttccactgactttcgccatgacgaaccagaaccagcttagttacagccatatacttactcctcaaatcatcttttaatgataataattctcattatattgccgcgacgaagcaacagcaatgcttacgcataaccatagcgaaaatagtggcgcagtgtaaggttgttgtgaatattgagttgcaaatatgtcggtgtttgctggtgatttgaacaatatgagataaagccctcatgacgagggcgtaacattactcagcaataaactgatattccgtcaggctggaatactcttcgccaggacgcaggaagcagtccggttgcggccattcagggtggttcgggctgtccggtagaaactcgctttccagagccagcccttgccagtcggcgtaaggttcggttccccggctcggtgtgccgccgaggaagttgccggagtagaattgcagagccggagcggtggtgtagaccttcagctgcaatttttcatctgcactccagacatgcgccgccactttcttgccatcgcctttggcctgtaacaagaatgcgtgatcgtaacctttcactttgcgctgatcgtcgtcggcaagaaactcactggcgatgattttggcgctgcggaaatcaaaagacgttccggcgacagatttcaggccgtcgtgcggaatgccgccttcatcaaccggcagatattcgtccgccagaatctgcaacttgtgattgcgcacgtcagactgctcgccgtcaagattgaaatagacgtgattagtcatattcaccgggcaaggtttatcaactgtggcgcgataagtaatggagatacggttatcgtcggtcagacgatattgcaccgtcgcgccgagattacccgggaagccctgatcaccatcatcactactcagggcaaacagcacctgacgatcgttctggttcacaatctgccagcgacgtttgtcgaacccttccggcccgccgtgcagctggttaacgccctgacttgggctaagcgtcacggtttcaccgtcaaaggtataacggctattggcgatacggttggcataacgaccaatagaggcccccagaaacgcggcctgatcctgatagcattccgggctggcacagccgagcagcgcctcgcggacgctgccatcggaaagcggaatacgggcggaaagtaaagtcgcaccccagtccatcagcgtgactaccatccctgcgttgttacgcaaagttaacagtcggtacggctgaccatcgggtgccagtgcgggagtttcgttcagcactgtcctgctccttgacttggtttacaaacgtaaaaagtctctttaatacctgtttttgcttcatattgttcagcgacagcttgctgtacggcaggcaccagctcttccgggatcagcgcgacgatacagccgccaaatccgccgccggtcatgcgtacgccacctttgtcgccaatcacagctttgacgatttctaccagagtgtcaatttgcggcacggtgatttcgaaatcatcgcgcatagaggcatgagactccgccatcaactcgcccatacgtttcaggtcgccttgctccagcgcgctggcagcttcaacggtgcgggcgttttcagtcagtatatgacgcacgcgttttgccacgatcgggtccagttcatgcgcaacagcgttgaactcttcaatggtgacatcacgcagggctggctgctggaagaaacgcgcaccggtttcgcactgttcacgacgggtgttgtattcgctgccaaccagggtacgtttgaagttactgttgatgatgacgacagccacacctttgggcatggaaactgctttggtccccagactgcggcaatcgatcagcaaggcatgatctttcttgccgagcgcggaaattagctgatccatgatcccgcagttacagcctacaaactggttttctgcttcctgaccgttaagcgcgatttgtgcgccgtccagcggcagatgataaagctgctgcaatacggttccgaccgcgacttccagactagcggaagaacttaacccggcaccctgcggcacattgccgctgatcaccatgtccacgccgccgaagctgttgttacgcagttgcagatgtttcaccacgccacgaacgtagttagcccattgatagttttcatgtgcgacaatgggcgcatcgagggaaaactcgtcgagctgattttcataatcggctgccatcacgcgaactttacggtcatcgcgtggtgcacaactgatcacggtttgataatcaatcgcgcagggcagaacgaaaccgtcgttgtagtcggtgtgttcaccaatcaaattcacgcggccaggcgcctgaatggtgtgagtggcagggtagccaaatgcgttggcaaacagagattgtgttttttctttcagactcatttcttacactccggattcgcgaaaatggatatcgctgactgcgcgcaaacgctctgctgcctgttctgcggtcaggtctcgctgggtctctgccagcatttcataaccaaccataaatttacgtacggtggcggagcgcagcagaggcggataaaagtgcgcgtgcagctgccagtgttgattctcttcgccattaaatggcgcgccgtgccagcccatagagtaggggaaggagcactggaagaggttgtcataacgactggtcagctttttcaacgccagcgccagatcgctgcgctgggcgtcggtcaaatcggtgatccgtaaaacgtgggctttgggcagcagtagcgtttcgaacggccaggcagcccagtaaggcacgacggctaaccagtgttcggtttcgacaacggtacggctaccgtctgccagctcgcgctgaacataatccaccagcattggacttttctgttcggcaaaatattctttttgcaggcggtcttcgcgctcagcttcgttaggcaggaagctatttgcccaaatctgaccgtgcggatgcgggttagagcagcccatcgccgcgcctttgttttcaaaaacctgcacccatgggtacgttttccccagttctgcggtttgctcctgccaggttttgacgatttccgtcaatgctgcaacgctgagctctggcagcgttttactgtgatccggactaaagcagatcacccggctggtgccgcgcgcgctctggcaacgcatcagcggatcgtgactttctggcgcatctggcgtgtcagacatcaaagccgcaaagtcattagtgaaaacgtaagtcccggtgtaatcggggtttttatcgcctgtcacccgcacattacctgcgcagaggaagcaatctggatcgtgcgcaggtaacacctgtttggctggcgtttcctgcgccccctgccaggggcgcttagcgcggtgcggactaaccagaatccattgcccggtgagcgggttgtagcggcgatgtggatgatcaacgggattaaattgcgtcatggtcgttccttaatcgggatatccctgtggatggcgactctgccagtgccaggtgtcctgcgccatttcatcgagtgtgcgcgttacgcgccagttcagttcacggtcggctttgctggcgtccgcccagtaggccggaaggtcgccctcgcgacgcggtgcaaaatgataattaaccggtttgccgcaggctttgctgaaggcattaaccacgtccagcacgctgttgcctacgccagcgccgaggttgtagatgtgtacgcctggcttgttcgccagtttttccatcgccacgacgtgaccgtccgccagatccattacgtggatgtaatcgcgtacgccagtaccatcttcggtcggataatcgttaccaaaaatcgccaggctgtcgcgacggcctacagcaacctgggcgatgtatggcatcaggttattcggaatgccttgcggatcttcgcccatatcgccgctcggatgcgcgccaaccgggttgaagtagcgcagcagggcaatgctccagtccggctgggctttttgcagatcggtgaggatctgttccaccatcagcttgcttttgccgtaagggctttgcggtgtgccggtcgggaagctttcaacgtatggaattttgggctgatcgccataaacggtggcggaggagctaaaaataaagtttttgacgttagcggcgcgcatggcgctaatcaggcgcagagtgccgttgacattgttgtcgtaatattccagcggtttttgtacgctttcgcccacggctttcagcccggcgaagtggatcacggtgtcgatagcgtgatcgtgcaggatctcggtcatcaacgcttcgttacgaatatcgccttcaacaaacgttggatgtttgccgcctaaacgctcgataacaggcagtacgatgcgcttactgttacagaggttatcaagaatgatgacatcatgaccgttttgcagtaattgcacacaggtatgacttccaatgtaaccgctaccaccggtaaccagaactctcataattcgctccattaggcttatggtatgaaataaccatagcataacaaagatgcgaaaagtgtgacatggaataaattagtggaatcgtttacacaagaatttagccgttttttatgcgcgattaagtgattataaaacagagggtttatgaatgattgcgctttttatctgaaaaaagacgcggtttcatgcctgcatgcgtcgaaccgttggccggagagggtgctaaggccgcctccggcaaggtcagcactaccgactcaatatatttttgtcagcacatagcgatagagtccaccgtccggcacgaactcaagacgatgggtaatacaggcaggcgcatcttcagcgtggtggctaacaaacaacaattgcgtttcaccttcgctaatcagcacatcaacaaaacggcggataagctggcgattcagcggatcaagcccctgtagtggttcatcgagaataagcaacgtcggatgtttcaccagtgcgcggacaatcagcgccagacgctgctgtccccaggaaagactatggaacggagcgtcagccgtgcgtttatcaatgccgagaatatccagccactgctgcaccagtttttgctggcgatcgctaacggcctgataaatgccaatgctatcaaaatagccagaaagaatcacattacgcacggtagtgctgacccggtaatccagatgcaaactactgctgacgtaaccgatatgctttttgatatcccagatggtttcgccgctgccgcgacgtcgtccgaaaagcgtcaaatcgttgctgtaaccttgcggatgatcgccagtaaccaggcttaataacgtgctttttcctgcaccatttggcccgacaatttgccagtgttcgcctggattcacctgccagctaaggttattaagaatggggcgatcgttataagaaaccacgccattgttcagcacaatgcgcggttcgttggcgggtaaggcgtgacgtgcactaggttcatccggctccggcagttgcacaccttcaagctgttcactatgcgccagttgcgcgacgagtgcttgttggagcagttcctctttagcgccagtttccgctaacgtgcaatccgccagcacgccagcaaactggacaaactccgggatctcatcgaagcgattgagcaccagtaccagagtaataccggactgatgtaagctggcgagtcgctcagccagctgctgacgactggcaacatccaggccatcgaacggctcatcaagaatcaacaagtcaggctcgctcatcagcgcctgacacagcagggtttttcgcgtctcgccagtggaaaggtatttaaagcgtcggtcgaggagggcggtaataccgaactgctgcgccagttgcatgcaacgcggtgcatcctttacttcatcctgaatgatctcagccgtagtgcgtccggtgtcatcttcgccagggccgagcatatcggtgttattccgctgccattcgtcgctgacgagtttttgcaattgctcgaaggagagacgagtgatgtgggaaaactggctttgccgttcacctttcaaaagcggaagttcccccgccagcgcgcgggccagggcgcttttcccgcttccattgctaccgacaaacgcccaactatcacccgcgtttaacgttagctgaggcaattgcagcgtttttgtgtcgctaagacgaaacgtgccttgcaaaatttgcaagctactcattttatatcccactttgtgcagcgattactgacagggatacgtgtttcataacaaattgtcaacacgcttagcacagcgtggcgataatcacgctgtcggcattaaagtaggccgtgacattctgtccttgctgaagagaagtcgcttcatttaccggcactgtggcgcacagtgtttgcccgtcgggtagcgccattaatacttcgcactgctctgcgccgcgctcaatatgactaataatacccggtaattggttgtcagcgttttgcgcgaccgcctcgtcctgagtaatacctacccacggcgcttttagcaatatcaacacttctttgccttcatccagccccagacgcgcgccgctttgtgcggtaattgcgactttcaggcgtgtttttccgtcagccagtaagacatcaacatgctgttgaacgtcatcatgatcgcgggcggtgatggtaccgaaccactggttacgggcgctggtttgcagactaaaacgactgatcgcggccagcaggctgttcagcggcagggcgtcatcgtcacttaacacatcaaaggctttttgctggatttgcgccagtaagtcatagagctgaatcagtcgctgaccatagcgggtcagtactgcgccgccgccacctttaccgcctgttgcgcgctcgaccagaatatgctcacttaactgattcatctcgttaatggcatcccaggcgcttttatagctaataccggcatctttcgctccctggctaatggaaccggaaagcgcaatgtgttttagtaggctaatgcggcgcgggtcggcgaataatttttgttggagcttaagggtgagaaggatttcggcctgcataacaatgtcctggcaaaagtcttattgtgacggaaaacgaacgccacgcaaagctgaccgcacaaaaggggagtgcttttctgtgcttagcggttagaatagtctcatgactatatctggagttgaccatgttagagttattaaaaagtctggtattcgccgtaatcatggtacctgtcgtgatggccatcatcctgggtctgatttacggtcttggtgaagtattcaacatcttttctggtgttggtaaaaaagaccagcccggacaaaatcattgattccctgaatgcccgcttagtcgggcattttctttttctcaacttcctgcttttcctgccgatattttttcttatctacctcacaaaggttagcaataactgctgggaaaattccgagttagtcgttatattgtcgcctacataacgttacattaaggggttaccaatggctcgtaaatggttgaacttgtttgccggggcggcactctctttcgctgttgctggcaatgcactggcagatgaagggaaaatcacggtgttcgccgccgcaagtctgactaacgcaatgcaggacattgctacgcagtttaaaaaagagaaaggcgtggatgtggtttcttctttcgctagcagttctactctcgcccgtcagattgaagcgggtgcgcctgcggatctgtttatttctgccgatcagaaatggatggattatgcggttgataaaaaagcgatcgatacagctacgcgtcagacactgctcggcaatagcctggtcgttgtagcaccgaaagccagcgtgcagaaagatttcaccatcgacagcaaaaccaactggactagtctgctgaatggcggtcgcctggcggttggcgatccggaacatgttcccgctggcatttatgcaaaagaagcactgcaaaaactgggcgcatgggatacgctctctccgaaactggccccagcggaagatgttcgtggggcgctggcgctggtcgaacgtaacgaagcgcctctgggcattgtctacggttctgacgcagttgccagcaaaggggtaaaagtggttgccaccttcccggaagatagtcataaaaaagtggaatatccggttgctgttgtggaagggcataacaatgcgacagtgaaagcattttatgattatctgaagggaccgcaggcagcggaaatctttaaacgttacggatttacaatcaagtaatgatactgaccgatccagaatggcaggcagttttattaagcctgaaagtttcttccctggctgtgctgtttagcctgccgtttgggatcttttttgcctggttactggtgcgttgcacgtttccgggcaaagctctgctcgacagcgtactgcatctaccgctggtgttaccgcccgtggtcgtcggttacttattattagttagcatgggacggcgcggatttatcggtgaacgtctgtatgactggtttggtattaccttcgcctttagctggcgcggcgcggttctcgctgccgccgtcatgagctttccgctgatggtgcgggcaattcgtctggcgctggaaggggttgatgtcaaactggaacaggccgcaagaacactgggggccgggcgctggcgcgttttctttactatcacgttaccgctgaccttaccgggaattattgttggtacggtactggcttttgctcgttctctcggtgagtttggtgcaaccatcacctttgtgagcaacattcctggtgaaacgcgaaccattccttctgccatgtataccctgatccagacccccggcggggaaagtggagcggcgagactgtgcattatttctattgcgctggcgatgatctccctgttgattagtgaatggctggccagaatcagccgtgaacgggcggggcgctaatcatgctggaactgaatttttcccagacgttgggcaaccattgcctgactattaatgaaacgctgcccgccaatggcatcactgctatctttggcgtctccggtgccggaaaaactagcctgattaacgccatcagtggactgacgcgcccgcaaaaagggcggattgtcctcaatgggcgggtactaaatgatgccgaaaaaggtatctgcctgacgccggaaaagcgtcgcgttggctatgtttttcaggatgcgcggctgttcccgcattacaaagtgcgtggcaatctgcgctacggcatgagcaaaagtatggtcgatcagttcgataagctggtggcgcttttaggcattgaaccgttgcttgaccgtttaccaggcagcctgtccggaggcgaaaaacagcgcgtggcgattggtcgggctttgctgacagcaccggaattgctgttgctggatgaaccgctggcgagtctggatattccgcgtaaacgcgaactgttgccttatctgcaacggctgacacgggaaatcaacattccgatgttgtatgtcagccatagcctggatgagatcctccatctggcagacagagtgatggtactggaaaacggtcaggtgaaagcctttggcgcgctggaggaagtgtggggcagtagcgtgatgaatccgtggctgccgaaagagcaacaaagtagcattctgaaagtgacggtgcttgagcatcatccgcattacgcgatgaccgcgctggcgctgggcgatcagcatttgtgggtcaataagctggacgaaccgctgcaagctgcgctacgtatccgcattcaggcttccgatgtttctctggttttacaaccgccgcagcaaaccagcattcgtaacgtattgcgggcaaaagttgttaatagttatgacgacaacggccaggtggaagtggaactggaagtcggcggtaaaacgctgtgggcgcgtatcagcccgtgggccagggatgaactggcgatcaaacctggcctgtggctgtacgcgcaaattaaaagtgtgagcataaccgcctgattaaatcaggtggctataaatgaactgggcaatgctgtcggtggtgttatcaccaatcacaatgttggcgcgcgcttttaccgcgtcatcggcgttgcccatcgccacgcctgtaccagcggcttccagcatactgatatcattaaagttatcgccgaatgccacgacgttttccatgctccaaccttgcgcctcaacccatttcgtcaaacgtttacctttgctgttgccgccgcgtgcaatatcaacctgatcgtgccaggaccattcacactccagtcccagttcatgttcgacatgcttaccaaaatgctgcaattgcggcaggtcatcgtgcgtcagggcgaacttccatacggcgttaacttgttgcgccgtttcagccagagaagcgacttgtgtgaaagtcggacgctgttccggcggcagggtttgcgcccagttagatgtgcgaatgacatgcccggtcgggtgctcatagaccattgcatcatcgacatacatcagaccgtgaatgtggtgttcattcagcatctcaatgagttgcagggctttaataacgggcattgggtccgcttccagcacggtttttgcatgataatcatacaaataggtgccattacagcaaatagcaggtgtatccagcgccagcgcctgataaaaaggatgaatagcgacgtgatggcgacctgtgacgatgattaattgatagcctgcttcgcgagcgcgggccagggcttctatgctactaggaagcagggtctttttcggggtcaataaggtgccgtctaagtcgagagcaatcacgcgtgtggtcatggcgtattccagattaaggttaagaattttcgtctgcgcgaatggtacaccgataccactatcggacaaaattctgcgttttaattcagcattcaccgccaaaagcgactaattttagctgttacagtcagttgctaaatgcaaaggagcattcatgaagcaaacagtttatatcgccagccctgagagccagcaaattcacgtctggaatctgaatcatgaaggcgcactgacgctgacacaggttgtcgatgtgccggggcaggtgcagccgatggtggtcagcccggacaaacgttatctctatgttggtgttcgccctgagtttcgcgtcctggcgtatcgtatcgccccggacgatggcgcactgacctttgccgcagagtctgcgctgccgggtagtccgacgcatatttccaccgatcaccaggggcagtttgtctttgtaggttcttacaatgcgggtaacgtgagcgtaacgcgtctggaagatggcctgccagtgggcgtcgtcgatgtggtcgaggggctggacggttgccattccgccaatatcagtccggacaaccgtacgctgtgggttccggcattaaagcaggatcgcatttgcctgtttacggtcagcgatgatggtcatctcgtggcgcaggaccctgcggaagtgaccaccgttgaaggggccggcccgcgtcatatggtattccatccaaacgaacaatatgcgtattgcgtcaatgagttaaacagcagtgtggatgtctgggaactgaaagatccgcacggtaatatcgaatgtgtccagacgctggatatgatgccggaaaacttctccgacacccgttgggcggctgatattcatatcaccccggatggtcgccatttatacgcctgcgaccgtaccgccagcctgattaccgttttcagcgttagcgaagatggcagcgtgttgagtaaagaaggcttccagccaacggaaacccagccgcgcggcttcaatgttgatcacagcggcaagtatctgattgccgccgggcaaaaatctcaccacatcagcgtatacgaaattgttggcgagcaggggctactgcatgaaaaaggccgctatgcggtcgggcagggaccaatgtgggtggtggttaacgcacactaaccgctgatttacccggcgcagtctctcctgcgccggtgtattaacctatctcctgtaacgcgtgtctctggcgttcgacgatattggtccacaaattgtctttatcgtcagtccataaattaatcagcaaggcaaaaaagcgttctgctgctggagaaagtacggcatctttacggcgaattattcccaatgttcgacgtataacgggttccaccaatgggataccaataatgctagaatagggcgcatgaggcattgccaggccaggaagcgcgctaatccccagtcccgcctccaccagtcctaaactcgtgctaagatgacgcacttcgtaaaaccagtccagcttccagggcttgtcggccagctgttgttctatcaacagtcggttgccgctggaggagcgtacgccaatcattttgtaacccactaactcctgccattctacaagctgctttttggccaatggatggtcacgccgacaggccagcacgaacggctcgttgaccagtggggtaaaatcaatggaactatttgtgacgttgttcatgtttatgccaaagtcactttcgttacacagcacgctttccatgcaattattcgtgccttgttccagaatccgcactttaatattgggatacagctcattaaatttaccgattgccagcggtaaaaaataaaatactgcggtcggaatacacgctaacgtcaccataccacgatgataagcattcatatcacgaatattaaaaagcgtttcatcgaatttctttattaattcccgcgcctccgggagcaacctttttcctgcttttgttaacgtaaccttgcgagttgtacgctcaaatagttgaacatgtaaatcttcctccatcttttttattcttcgcgttaatgcaggttgcgtaatattgagtaatttagcggcattgttaaagctactggactctgccagtatgacaaatgccttcatactacttaattcatgcttcattattactccggaaaatggaaggctgctttttgggtggctggccgttaaaaattttaactgcatttagccaacttaaattaatgaaaaaatgttattaatcgttgagctaaagtcattagagatgctttgcccttaatgtaaccatatcgcaataagttatgtttttaaattgagggcattattatgaaaaaaataccctgcgtgatgatgcgaggtggaaccagcaggggcgcgttcctgttagcggaacatttacccgaagatcaaacgcagcgcgataaaatattgatggcaattatgggttccggtaacgatctggaaattgacggtattggcggcggtaatccactgaccagtaaagtcgccattattagccgttccagcgatccgcgtgctgatgtcgattatctgtttgcgcaggtaatcgttcatgagcaacgtgtcgataccacgcctaactgcggcaatatgctgtctggtgttggggcattcgccattgaaaatggtttgattgcagcgactagcccagttactcgcgtacgtatccgcaacgtcaatacgggtacgttcatcgaagctgatgtgcaaacgccaaatggtgttgtcgagtacgagggtagcgccagaattgacggcgtaccgggtactgccgcaccggttgcgctcactttcctgaatgccgctggaaccaaaaccggaaaagttttcccgactgataatcagattgattattttgacgatgtcccggtgacctgtatcgatatggcgatgccagtcgtcattattccggctgaatatctgggaaaaacaggttatgaattaccggcggaactggatgccgacaaagcattattagcccgcattgaatctatccgtctacaagcgggtaaagcaatgggcttaggtgatgtcagtaatatggttatccctaaacctgtgcttatttctccagcgcagaaaggcggggcaattaatgtgcgttattttatgccgcattcttgccatcgcgcgctggcgataaccggtgctattgctatttccagtagttgtgcattggaaggcaccgtcacccgacaaatcgtcccttctgtaggatacggcaatatcaatattgaacaccccagtggtgcgctcgacgttcatttaagtaatgaaggtcaggatgccacgacgttacgcgcatctgttattcggacgaccagaaaaatattttccggtgaagtttatcttccctgaaaaaattcgttgtcaggataaggacaatcaataaaggacttctgtatgagtcatacagaaagaacaggattttaaatgaataagaaaagcttatggaagctaattctgatattagcgatcccatgtattattggttttatgccagctccggcaggattaagcgaactggcgtgggtgctttttggtatttacctggcggccattgtggggctggttatcaagcctttcccggaacctgtcgtactgttaattgccgttgctgccagtatggtggtggtcggtaacttatccgacggtgcgtttaaaaccaccgccgtattaagcggttactctagtggtaccacctggctggtgttcagcgcgtttaccttaagcgccgcatttgtgaccaccggtttaggtaaacgtattgcctatctgctgattggtaaaatcggtaacaccacgctgggtctgggttacgttacggtattcctcgatctggtactggctccggcaacaccgtctaacaccgcgcgtgcgggcggcattgtgttaccgatcatcaacagcgtggcggtggctttggggtccgaaccggaaaaaagtccgcgtcgtgtcggacattacctgatgatgtccatttacatggtcaccaaaaccaccagctatatgttctttaccgcaatggcggggaacattctggcgctgaaaatgatcaacgacattctgcacctgcaaattagctggggtggatgggcgctggcagccggattgccgggcatcattatgctgctggtcaccccgctggtgatttacaccatgtatccaccagaaattaagaaggtggataacaaaaccatcgctaaagcgggccttgccgaactaggaccgatgaaaatccgcgaaaaaatgctgctcggtgtctttgtgctggcgctgctgggctggattttcagtaagtctctgggggttgatgaatccaccgtggcaatcgttgttatggcaaccatgctgctgctgggtatcgttacctgggaagacgtggttaaaaataaaggcggctggaataccttaatctggtacggcggtattatcggcttaagctccttattaagcaaagttaaattcttcgaatggttagctgaagtctttaaaaataacctggcatttgatggtcacggtaacgttgctttcttcgttattattttcctcagcattatcgtgcgttatttcttcgcttccggtagtgcctatatcgttgctatgttaccggtatttgccatgctggcgaacgtctccggcgcaccgttaatgttaaccgcgctggcactgttgttctccaactcctatggcggcatggttactcactatggcggcgcggcaggtccggtcatctttggcgtgggttataacgatattaaatcctggtggttggtcggtgcggtactgacgatattaaccttcctggtgcatatcaccctcggcgtgtggtggtggaatatgctgatcggctggaacatgctgtaaatattctcgtcatacttcaagttgcatgtgctgcgtctgcgttcgctcaccccagtcacttacttatgtaagctcctggggattcactcgcttgtcgccttcctgcaactcgaattatttagagtatatccatttattatctttctgcgcacttcacggtgcgcagatatctggagcatttgatgatcaagttatctgaaaaaggcgtgtttctcgccagtaataacgaaataattgccgaagaacatttcaccggcgaaattaaaaaagaagaagccaaaaaaggcactattgcctggtctattctctctagccataatacgtccggaaatatggataaacttaaaattaagtttgatagtttagcctctcacgatattacctttgttggtattgtacagaccgctaaagcgtccggtatggaacgtttcccgctgccgtatgtgctgaccaactgccataacagtctctgcgccgtcggcggcactattaacggtgatgaccatgtttttggtttaagcgcggcccagcgttatggcggtatttttgtgcctccgcatattgcggtcatccatcaatatatgcgtgagatgatggcaggcggcggcaaaatgatcctcgggagtgacagccacacccgttacggtgcattagggacaatggcagtcggtgagggcggcggtgagttggtaaaacagctgcttaatgacacctgggatatcgactatccgggcgtggttgcggtgcatctgaccggaaaacctgcgccgtatgtggggccacaggatgtggcgctggctatcattggcgcggtgttcaaaaacggttacgtcaaaaacaaagtcatggagttcgttggaccgggcgttagcgcgctctctaccgatttccgtaacagcgttgacgtgatgaccactgaaacgacctgtttaagttctgtctggcaaaccgatgaagaagtccataactggctggcgctgcacggtcgcggccaggattactgccagcttaaccctcaaccgatggcgtactacgatggctgcatcagcgttgatttaagcgccatcaaaccaatgattgcgctgccgttccacccgagcaacgtgtatgaaatcgacacactgaaccagaacctgaccgacattctgcgtgagattgaaattgagtccgaacgcgtggcgcacggtaaagccaaactcagcctgctggataaagtggaaaatggtcgcctgaaagtgcagcaggggattatcgcgggctgttctggcggtaactacgaaaacgtcatcgcggcggcgaatgcactgcgcggtcaatcctgtggcaatgacaccttcagcctggcagtttacccgagtagtcagccggtgtttatggatctcgccaaaaaaggtgtggtagcagatttgattggcgcaggcgcaatcatcagaaccgcgttctgcggcccatgctttggcgcgggcgatacgccaatcaacaacggtttgagtattcgccacaccacgcgtaacttcccgaaccgcgaaggctctaagccagctaatgggcagatgagtgcggtggcgttgatggacgctcgttctatcgctgcgactgcggcaaacggtggctatttaacctctgccagcgaacttgattgctgggacaacgtgccggagtacgccttcgatgtaacgccgtataaaaaccgtgtttatcagggctttgtgaaaggggcaactcagcaaccgctgatttacgggccgaacattaaagactggccggaattgggtgcgctgactgacaatatcgtcctgaaagtgtgcagcaagatcctcgacgaagtgaccaccaccgacgaactgattccttccggtgaaacctcttcttatcgtagtaatccgattggtctggcggagtttaccctgtctcgccgcgatcccggttatgttagcagaagtaaagcgactgctgagctggaaaatcagcgtctggcggggaatgtcagcgagctgacagaggtgtttgcgcgcattaagcagattgctggtcaggagcatattgatccgctgcaaactgaaattggcagcatggtctatgcggtgaaaccaggcgatggttctgcgcgtgaacaggcggcgagctgccagcgtgtgattggcggtctggcgaatattgccgaggagtacgcgactaaacgctatcgttctaacgtcatcaactgggggatgttaccgctgcaaatggcggaagtaccaacctttgaagtgggggattacatttacatccctggcattaaagcggcgctggataatccgggtacgacgtttaaaggttatgtgatccatgaagatgcgccggtaacggaaattacgctctatatggaaagtctgactgctgaagagcgcgagattatcaaggcgggtagtttgattaacttcaataaaaaccgtcagatgtaaaaagcgccatgtgaatgtaggtcgcattcggcacttattgtcggatgcgatgcttgcgcatcttatccgacctacgaatcgcatcgaatctgtaggccagataaggcattttcgcagcatccggcacttattgtcggatgcgatgcttgcgcatcttatccgacctacaaatcgcatcgaaccgtaggccggataaggcgtttacgccgcatccggcaaatagttaattgcccttacttcttcgcctctgcaaccactttactacccacgccgcggttattgtattcccacatgcggttgtagttagtgtcattcagattgcgctgtatttcgtcgttatcatctacgctgccggtattacccgcaaacggacgattagagatcaccgcatcggcccacggtttagccgtgttaaaaccttcgttgatggcgctatcacggatcaccacctgaccgttggtattggcatcaacatccaggctgcggcccagttgcgccacaccatcaccgaaagcattgaaacggctgtttacggcgaggaaaccgtagtaaatgttggacagcgtagccggtgcaaacacatacgcttcttgctgagtacgactgttcaccacgcggaattcggtgttatcgaacaccactgcgccgcgaccagaaacgatatccacatccccttcaatgtagctgttggtcaccagcgtacgcggctgacgattcgtttccagacggttctgcacaccgctgttggtgacaaagaaggtgttctgacgaccgagaatgttaacgttgttaatctgtacctggtcaccatcagtacgcagtgccaccgccggatggttacctgcatctacgctatcgcccagcgtgttttcgatggtcagattttgcagttgcaggccattgttttgactccagaagaccgcagagcagagaacaccgatactgtcgctgcgtttgctctggcagctatcgtacatataccacgctggtttacctggcatatatttgccgcgcgggttgacgtcgtgacgccagtcggcagggctcatgccaccattaagggaaagcccaatcttcacatcaatcggtttttcacctgtaccgtacagagtaattccacccggagcggcagggacatataccgttccctgatactcaccaggcatcacggcaatatactggcgcttgttggtacgcttgataattgccgcatctaccgccgcctgaatcgtggtatgcgttacaccttgagtgcccgccgggccgacaacaaagtcaggttgcgcaggcagggtaatcggggaaggattccacgctgcagcacctggtgtcagggatgcaaaatagtgttgagcatcgaaattctgcgcttcttttgcgctcagaatcgggcgagaagaggtaccaggcgcggtttgatcagaaggacgttgatcgggcggggtactgctacaggcggtcagcgtcacgccaaaagccaatgccagcgccagacgggaaacactaaatgtgttcacaggttgctccgggctatgaaatagaaaaatgaatccgttgaagcctgcttttttatactaacttgagcgaaacgggaaggtaaaaagacaaaaagttgtttttaatacctttaagtgataccagatggcattgcgccatctggcagagtgattaactaaacatcgcagtaatgctggcgcttgccagagagtggaaatgaacgttaaacccgaccatcgcgccgctggcaccttcatcgacatcaatacgttctatatccagcgcgtgaacggtaaaaatgtagcgatgagtttcgcctttcggcggtgctgcgccatcgtacccggttttaccaaagtcggtacgcgtctgcaaaacgccgtctggcattgctaccagaccagagccaaacccttgcggtaatacgcgggtatcagcgggtaagttaacaactacccagtgccaccagccggagccggttggcgcatccgggtcgtagcaggtgacaacaaaacttttcgttcccgcaggaacatcatcccacgccagatgcggactaatattatcgccatcgtaacccatgccgttaaagacatgacgatgcggcaatttatcgccatcgcgcagatcgttactgatgagtttcatgaaccctcctttcttgtttgcagaaagtgtagccagaaaccctcacgcggacttctcgttattggcaaaaaaatgtttcatcctgtaccgcgcggttaaccgctgcggtcagacgctgcaactgttgcgggagaataatatagggcggcatcaggtaaatcagtttgccaaaaggccggatccagacaccctgttcgacaaagaatttttgcagcgccgccatattcaccggatgagtggtttcgaccacgccaatggcccccagtacgcgcacatcggcaaccatttcggcatcacgggcgggggcaagttgctcgcgcagctgtacttcaatatccgccacctgttgctgccagtcgccagattcgagaatcgccaggctggcgtttgctgccgcgcaggccagcggattgcccataaaagttggcccatgcataaagcaaccggcttcaccgttactgatggtttctgcaacctcgcgcgtggtgagtgtggcggaaagggtcattgtgccgccggttaaggctttaccgaggcacaaaatgtccggcgcgatttctgcatgttcacaggcaaacagtttcccggtacgaccaaatccagtggcgatctcgtcggcaatcagcaagataccttcgcgatcgcatattttgcggattcgttttaaccattccggatggtacatgcgcatcccgcctgcgccctggacaatcggctcaatgatcaccgccgcgatttcatgacgatgcgccgccatcaggcgggcaaagcccaccatatcgcgctcatcccattcgccatccatgcggctttgcggggcgggagcaaacaggttttctggcaggtagcctttccacagactgtgcatactgttatccggatcgcacacgctcatcgcgccaaaggtatcgccatgataaccattgcggaaggtcagaaaacgctggcgcgcttcgcctttggcttgccagtactgcaacgccattttcatcgccacttccaccgctacggaaccggagtccgcgagaaaaacgcactccagcggttgcggcgtcatcgccaccagtttgcggcacagctcaatggctggcgcatgggtgataccgccaaacatcacatggctcatggcatcaatttggctcttcatcgccgcattaagctgcgggtgattgtagccgtggatcgccgcccaccaggagctcataccgtcaaccaggcgtctgccgtcagacaaaatcagctcgcaaccttcggcgctcaccaccggataaaccggcagaggggaggtcatggatgtgtatgggtgccagatatggcgttggtcaaaggcaagatcgtccgttgtcataatcgacttgtaaaccaaattgaaaagatttaggtttacaagtctacaccgaattaacaacaaaaaacacgttttggagaagccccatggctcaccgcccacgctggacattgagccaagtcacagaattatttgaaaaaccgttgctggatctgctgtttgaagcgcagcaggtgcatcgccagcatttcgatcctcgtcaggtgcaggtcagcacgttgctgagcattaagaccggagcttgtccggaagattgcaaatactgcccgcaaagcagccgctacaaaaccgggctggaagccgagcggttgatggaagttgaacaggtgctggagagcgcgcgcaaagcgaaagcggcaggaagcacgcgcttctgtatgggcgcggcgtggaagaatccccacgaacgcgatatgccgtacctggaacaaatggtgcagggggtaaaagcgatggggctggaggcgtgtatgacgctgggcacgttgagtgaatctcaggcgcagcgcctcgcgaacgccgggctggattactacaaccacaacctggacaccagcccggagttttacggcaatatcatcaccacacgcacttatcaggaacgcctcgatacgctggaaaaagtgcgcgatgccgggatcaaagtctgttctggcggcattgtgggcttaggcgaaacggtaaaagatcgcgccggattattgctgcaactggcaaacctgccgacgccgccggaaagcgtgccaatcaacatgctggtgaaggtgaaaggcacgccgcttgccgataacgatgatgtcgatgcctttgattttattcgcaccattgcggtcgcgcggatcatgatgccaacctcttacgtgcgcctttctgccggacgcgagcagatgaacgaacagactcaggcgatgtgctttatggcaggcgcaaacagcattttctacggttgcaaactgctggccacgccgaatccggaagaagataaagacctgcaactgttccgcaaactggggctaaatccgcagcaaactgccgtgctggcaggggataacgaacaacagcaacgtcttgaacaggcgctgatgaccccggacaccgacgaatattacaacgcggcagcattatgagctggcaggagaaaatcaacgcggcgctcgatgcgcggcgtgctgccgatgccctgcgtcgccgttatccggtggcgcaaggagccggacgctggctggtggcggatgatcgccagtatctgaacttttccagtaacgattatttaggtttaagccatcatccgcaaattatccgtgcctggcagcagggggcggagcaatttggcatcggtagcggcggctccggtcacgtcagcggttatagcgtggtgcatcaggcactggaagaagagctggccgagtggcttggctatagccgggcactgctgtttatctctggtttcgccgctaatcaggcagttattgccgcgatgatggcgaaagaggaccgtattgctgccgaccggcttagccatgccagtttgctggaagctgccagtttaagcccgagccagcttcgccgttttgctcataacgatgtcactcatttggcgcgattgcttgcttccccctgtccggggcagcaaatggtggtgacagaaggcgtgttcagcatggacggcgatagtgcgccactggcggaaatccagcaggtaacgcaacagcacaatggctggttgatggtcgatgatgcccacggcacgggcgttatcggggagcaggggcgcggcagctgctggctgcaaaaggtaaaaccagaattgctggtagtgacttttggcaaaggatttggcgtcagcggggcagcggtgctttgctccagtacggtggcggattatctgctgcaattcgcccgccaccttatctacagcaccagtatgccgcccgctcaggcgcaggcattacgtgcgagcctggcggtcattcgcagtgatgagggtgatgcacggcgcgaaaaactggcggcactcattacgcgttttcgtgccggagtacaggatttgccgtttacgcttgctgatagttgcagcgccatccagccattgattgtcggtgataacagccgtgcgttacaactggcagaaaaactgcgtcagcaaggctgctgggtcacggcgattcgcccgccaaccgtacccgctggtactgcgcgactgcgcttaacgctaaccgctgcgcatgaaatgcaggatatcgaccgtctgctggaggtgctgcatggcaacggttaataaacaagccattgcagcggcatttggtcgggcagccgcacactatgagcaacatgcagatctacagcgccagagtgctgacgccttactggcaatgcttccacagcgtaaatacacccacgtactggacgcgggttgtggacctggctggatgagccgccactggcgggaacgtcacgcgcaggtgacggccttagatctcagcccgccaatgcttgttcaggcacgccagaaggatgccgcagaccattatctggcgggagatatcgaatccctgccgttagcgactgcgacgttcgatcttgcatggagcaatctcgcagtgcagtggtgcggtaatttatccacggcactccgcgagctgtatcgggtggtgcgccccaaaggcgtggtcgcgtttaccacgctggtgcagggaagcttacccgaactgcatcaggcgtggcaggcggtggacgagcgtccgcatgctaatcgctttttaccgccagatgaaatcgaacagagcctgaacggcgtgcattatcaacatcatattcagcccatcacgctgtggtttgatgatgcgctcagtgccatgcgtagcctgaaaggcatcggtgccacgcatcttcatgaagggcgcgacccgcgaatattaacgcgtagccagttgcagcgattgcaactggcctggccgcaacagcaggggcgatatcctctgacgtatcatctttttttgggagtgattgctcgtgagtaaacgttattttgtcaccggaacggataccgaagtggggaaaactgtcgccagttgtgcacttttacaagccgcaaaggcagcaggctaccggacggcaggttataaaccggtcgcctctggcagcgaaaagaccccggaaggtttacgcaatagcgacgcgctggcgttacagcgcaacagcagcctgcagctggattacgcaacagtaaatccttacaccttcgcagaacccactagcccgcacatcatcagcgcgcaagagggcagaccgatagaaagtttggtaatgagcgccggattacgcgcgcttgaacaacaggctgactgggtgttagtggaaggtgctggcggctggtttacgccgctttctgacactttcacttttgcagattgggtaacacaggaacaactgccggtgatactggtagttggtgtgaaactcggctgtattaatcacgcgatgttgactgcacaggtaatacaacacgccggactgactctggcgggttgggtggcgaacgatgttacgcctccgggaaaacgtcacgctgaatatatgaccacgctcacccgcatgattcccgcgccgctgctgggagagatcccctggcttgcagaaaatccagaaaatgcggcaaccggaaagtacataaaccttgccttgttgtaaccattctgtatttggttaaattgcgagcgagatcgcgtcttcgattgactgcaatttaaccaattaaattctaaaataatcacgaaaaaaattttacttccgcctcatgcggcgaatgtgggaattgcccaggcggcgggggataggggctggagacagttatccactattcctgtggataaccatgtgtattagagttagaaaacacgaggcaagcgagagaatacgcggcttgcacgcgaattggcgttaaagacggctcaaagaaatatcttttattttttaactggttagataaatgcaatggcagtcactgaacaggcatctcttgccataaaactgtcatcactcatcttgacaaatgttaaaaaagccgttgctttggggataacccggtaaggccggagttttatctcgccacagagtaaattttgctcatgattgacagcggagtttacgctgtatcagaaatattatggtgatgaactgtttttttatccagtataatttgttggcataattaagtacgacgagtaaaattacatacctgcccgcccaactccttcaggtagcgactcatgagtaaaccgttcaaactgaattccgcttttaaaccttctggcgatcagccagaggcgattcgacgtctcgaagaggggctggaagatggcctggcgcaccagacgttacttggcgtgactggcagtgggaaaaccttcaccattgccaatgtcattgctgaccttcagcgcccaaccatggtacttgcgcccaacaaaacgctggcggcccagctgtatggcgaaatgaaagagttcttcccggaaaacgcggtggaatatttcgtttcctactacgactactatcagccggaagcctatgtaccgagttccgacactttcattgagaaagatgccagcgttaacgaacatattgagcagatgcgtttgtccgccaccaaagcgatgctggagcggcgtgatgtggttgtggtggcgtctgtttccgcgatttatggtctgggcgatcctgatttatatctcaagatgatgctccatctcacggtcggtatgattatcgatcagcgcgcgattctgcgccgactggcggagctgcaatacgctcgtaatgatcaagcattccagcgtggtactttccgcgttcgtggcgaggtgatagatatcttcccggcagaaagcgatgacattgcacttcgcgtggaactgtttgacgaggaagtggaacgattgagcttatttgacccgctgaccgggcagattgtttccactattccacgttttaccatctacccgaaaacgcactacgtcacaccgcgcgagcgcatcgtacaggcgatggaggagatcaaagaagagctggccgccagacgcaaagtgctgttggaaaacaacaaactgctggaagagcagcggctgacccagcgtacccagtttgatctggagatgatgaacgagctgggctactgtagcgggattgaaaactacagccgcttcctctccggtcgtggaccgggtgagccaccgccgacgctgtttgattacctgcctgccgatgggctgctggtcgtcgatgaatctcacgtcaccattccacaaattggcggcatgtatcgcggtgaccgggcgcgtaaagagacactggtggagtacggcttccgcctgccaagtgcgctggataaccgtccgcttaagtttgaagagttcgaagcattagcgccgcaaaccatctatgttagcgcgacgccgggtaattacgagctggaaaaatccggcggcgatgtggtggatcaggtggtgcgtccaaccggattgcttgacccgattatcgaagtgcggccggtggcgacacaggttgatgatcttcttagcgagattcgtcagcgagcggcaattaacgaacgcgtactggtcaccacactgaccaagcggatggcggaagatcttaccgaatatctcgaagaacatggcgagcgcgtgcgttatcttcacagtgatatcgacaccgtcgaacgtatggagattatccgcgacttgcgtctgggtgagttcgacgtgctggtagggatcaacttactgcgcgaaggtctggatatgccggaagtgagcctggtggcgatcctcgacgctgacaaagaaggcttcctgcgttccgaacgtagcttgatccagaccattggtcgtgcggcacgtaacgttaacggtaaagcgattctctacggcgataagatcaccccaagtatggcgaaagcgattggcgaaaccgaacgtcgccgtgagaaacagcagaagtacaacgaggaacacggaattacgccgcaaggcttgaacaagaaagtggtcgatatcctggcgctggggcagaacattgccaaaaccaaagcgaagggcagaggaaaaagccgcccgattgttgagccggataatgtgccgatggatatgagccctaaagcgttgcagcagaaaatccatgagctggaagggttgatgatgcaacacgcgcagaatctggagttcgaagaagcggcgcaaattcgtgaccagttgcatcagctgcgtgagctgtttatcgcggcaagctaacaggatagcgaagaagactgatgacaaacggaaaacagcctgatgcgctacgcttatcaggcctacattttctccgcaatatattgaatttgcgcggtttgtaggccggataaggcgttcacgccgcatccggcataaacaacgcgcactttgtcttcaataggaagccggaattttccttcggatttccgttaacctaaagcctgtaacgccttttccagcgcgttatgtaacaactggcggtcatgacgatacggaatatcgctggcctccagtacctcctggatcacaatccgctctttcaccgcgctgacatccacttttggcccgacgatgaccgcatcaatgacctttttaccaacatactgctccataattgccagcttgctttccagcttcaaattagccgcaggtaaactcaactcacgccccagattgccgatataaaccatcggcgctggcgtgcggcgtaatgcctgggcgatttccttcagcagcagaattggcatcaggctggtataaaaactgccaggcccaataatgatgagatccgcttcattgatagcgtgaaccgcctcacgcgttgcgggtacattaggcgttaacaataactcttgaatcggcgtagttaactggtcgatattgacctcgccgtaaacttcatgcccctgatcgtcaatcgccatcagatcaacaggatgctcactcattggaatcaaatgcgtatccactttcagcagattacgaattaaattgatggcttccagaggccgcacgctaaggtgatccagcgcctttaacatcaagtttccgagattatgaccggaaagttcgccattgccaccaaaacggtattcaaacatcgcggaggcgacgctcggttccgttatcagctggttgaggcagttgcgcatatcgccccaggcaatgccgccttcactacggcgaatacgccccgtgctgccaccattatcggtggtggtgacgatacccgttaaacgagaacccaaagagctaagactactgagaacgcgtcccagtccatgccctccgccgagagcaacgacacgatcaagatcagccagcgtacgattgcgcatatagtttcctggagtcagattatccgcgctacagtagcgcaaattgcggggaaacagcaattaacctgccaatattgaggatacaaactattttcttctacctctaaaggacgatgcacgctatgcctccctgatgatgtatatcaaagtaaaaccgccattttcccttattctgtagcgaaatagcacgatcatgacgctatatacatgattacatagcgaaagtgtggatggtaaaaatctcatttacacgctagtatcggcataaccactaaacactctagcctctgcacctgggtcaactgatacggtgctttggccgtgacaatgctcgtaaagattgccaccagggcgaaggaagaaatgacttcgcctcccgtatctggaaaggtgtacatggctagtcaactgactgatgcatttgcgcgtaagttttactacttgcgcctgagcattaccgatgtgtgtaactttcgttgcacctactgcctgccggatggctacaaaccgagcggcgtcaccaataaaggctttcttaccgtcgatgaaattcgccgggttacgcgcgccttcgccagactgggcaccgaaaaagtgcgcctgacaggaggagagccgtctttacgccgcgactttaccgatatcatcgccgctgtgcgggaaaacgacgctatccgccagattgcggtcacaaccaatggttaccgtctggaacgcgatgtggcgagctggcgcgatgcgggacttactggcattaacgtcagtgtcgacagtctggacgcccgccagtttcacgctattaccgggcaggataaattcaaccaggtcatggcagggattgatgctgcatttgaggccggttttgagaaggtcaaagtcaataccgtgctgatgcgtgatgttaatcatcaccagctcgacacctttctgaactggatccagcatcgccctatccagctgcgtttcatcgaactgatggaaacgggcgagggcagcgagctcttccgtaagcatcacatctctggtcaggttctgcgtgacgagctactgcgtcgcggctggatccaccaattacgtcaacgcagcgacggtcccgcgcaagtcttttgccatccagattacgccggagagattggccttatcatgccgtatgaaaaagacttctgcgccacttgcaaccgcctgcgcgtttcctccattggtaaactccatctctgcctgtttggtgaaggcggcgttaacctgcgcgatctgctggaagacgatacccagcaacaggcgctggaagcgcgtattagtgcggcgctgcgggagaagaaacagacccatttcctgcatcaaaacaacaccggtattacgcaaaacttaagctacattggcggctaaaacgtcaaaaggagagatcagatgagtcaggtaagcactgaatttatcccgacccgtattgctattcttacggtttctaatcgtcgcggtgaagaagacgatacctccggtcactatctgcgcgatagcgcgcaagaagcgggccatcacgttgtcgataaagccattgtgaaagaaaaccgctacgctattcgcgctcaggtatctgcgtggatcgccagcgacgatgtacaagtggtattgattacgggtggtactggcctgacggaaggtgatcaggctcccgaagcattgctgccgttgttcgaccgtgaagttgaaggttttggtgaagtgttccggatgttgagctttgaagagattggcacttccacgttgcaatctcgtgcggtagcgggcgtcgccaacaaaacgctgattttcgccatgccgggtagcaccaaagcgtgccgtaccgcatgggaaaatatcatcgcgccgcagctggatgcccgtacgcgtccgtgtaatttccatccacatttgaagaaataagtatgagccaactgacccatatcaacgccgctggcgaagcgcacatggtggatgtctccgccaaagcggaaaccgtgcgtgaagcgcgggcggaagcctttgtcaccatgcgcagcgagacgctggcgatgattattgatggtcgccaccacaaaggcgacgtatttgccactgcgcgtattgccggtattcaggcggcaaaacgcacctgggatctgatcccgctctgtcatccgctgatgctcagcaaagttgaagtcaatttacaggccgagccggagcacaatcgggtgcgtatagaaaccttatgccgcctgaccgggaaaaccggtgtcgaaatggaagcattaaccgcggcctccgtggcggcgctgaccatttatgacatgtgcaaagcggtgcaaaaagatatggtgattggtccggtacgtttgctggcgaagagcggcggcaagagcggtgactttaaggtggaagcggatgattaaagttctttttttcgcccaggtgcgcgagttggtgggaacagatgcaaccgaagtggctgcggatttcccaactgttgaagcgttacgccagcacatggctgcgcagagcgatcgctgggcgctggcgctggaagatggcaaattactggctgccgtcaaccagacgctggtgagttttgaccatccgctgactgacggcgacgaagtagctttcttcccgccggtaaccggaggttaagatggcagaaaccaaaattgttgttggtccgcagccgttcagcgtaggagaagagtacccgtggctggcggagcgtgacgaagacggtgcggtagtcacctttactggtaaggtgcgcaaccataacctgggcgacagcgtcaacgcattaaccctcgaacactatccggggatgactgaaaaagcactggcagaaattgttgatgaagcgcgtaaccgctggccgctggggcgcgtcactgtgattcaccgcatcggggaattatggccgggcgatgaaatcgtttttgtcggtgtcaccagtgcgcatcgcagcagtgcgtttgaagccgggcagtttattatggattatctcaaaacccgcgcaccgttctggaagcgcgaagccacgccggaaggcgaccgctgggttgaagctcgggagagcgatcagcaggcggcaaaacgctggtaattttttgttagccggataaggcaccgctgcgtccggcaatttcaccgctcagtacatacgtttacgctgcgtcgatgcacagcctcatcattttgcagtatccttaagatattccttatatcttcaggagatcgtcatggacagattcccacgttctgatagtatcgtacaaccccgggctggcttgcaaacttatatggctcaagtctatggctggatgaccgttggcttgttgctgaccgcatttgttgcctggtatgcggctaattccgcggccgtgatggagctgttgttcactaaccgtgtctttttaatcggtctgatcatcgcgcaattagcattggttattgtgttaagtgcgatgattcaaaagctgagcgcaggtgtaacgacgatgctctttatgctttatagcgcgctgacgggtcttacgctttccagtatattcattgtctataccgctgcttctatcgccagtactttcgtcgttactgccgggatgttcggcgcaatgagcctgtacggttacaccacgaagcgcgatttaagtggctttggcaatatgctgtttatggcgttaatcggcattgtgctggcaagcctggtcaacttctggttgaaaagcgaagcattgatgtgggcagttacctacatcggcgtgattgtctttgtcggattgacggcgtatgacacgcagaaactgaaaaatatgggtgagcagattgatacccgcgacacgagcaacctgcgcaaatattccattcttggcgcgttaaccttgtatctggacttcatcaacctgttcctgatgttgttgcggatcttcggcaaccgccgttaattctttttcaccatcactatcccggccatgtgtcgggatttttttcttactaaaaacgacacttaacaagtaccaggtataaaatatgccttatggacgagcggaagcgttttctgtatccataaatgcaaaagtattttgtatgcgtggttttaaatttattgatggtgaatattaatattttttctaaggataactaaaagaatggaaagttacagccaaaacagcaataaattagattttcagcacgaggccaggatattaaacggtatatggctcattaccgctttaggtttggtggcaaccgcaggactagcctggggagctaagtatatcgaaattacggcaaccaaatatgatagtccaccaatgtatgtcgccatagggttattattactttgtatgtatggcttaagtaaggatatcaacaagataaatgccgccatcgcgggcgtaatatatctgtttttactctctttggtggcgattgtcgttgcaagtttagttcctgtatatgccattatcatcgtgttcagcactgcgggcgcgatgtttttaatcagtatgctggccggtttattatttaatgttgatcctggttctcaccgttttatcattatgatgacgttgacagggttggccctggtaatcatcgtgaatgcggcattaatgagtgaacggcccatttggataataagttgcttaatgattgtgttatggagtggcattatcagccatggacgaaataagctccttgaattggcggggaaatgccatagtgaagagttgtggagtccggttcgttgcgcttttacaggtgcattaacactctattactattttatcggcttctttgggatacttgccgcgatagctataacgcttgtctggcaaaggcatacgcgtttttttcattaaccgtaaatgcacatactaaagaacttaactaaacttcacatcgccgcttcatttttcgcccgtagcttcttcgcctggctttccagcaacaggtaacagatcagcgccagcagcagtgggataaagtaatacagcacacggtaagcgagtagggcggcgataattgtacctttggaggtatgctccccagccagtagtgcgataaacaccgcttccagcacaccgatccccgccggaatatgcacgatgacgccagcaatactactaaccagtaacacgcccagtacaaagaaatagttcacgctttgaccaagtaacagccagataatcgcccccattaccatccagttaacgctggaaatcagcatctgagcgagggcgaatttccaactaggcagcaccagcttttgccctttgatggtcatatggcggtgcttcgcgaaagcgcaaaaccacaaataaaccgcgataatcatcagtaagccaatgccgagaatacgcagcgtagtttgatcgacataccagtgatccggcaactccaccacgcctgcggtaaagataatccctgccagtaaaatgtagcccagccagttggtggtaatactgaggctgaaaatccgcgtaatagtgctaccgggcaaccccagacgagagtacaaacgatagcgcataccaatgccgccgacccaggtactgagcgtcaggttgaaggcgtagcagataaagctcaccagcatcacctggcgcttcgccagtttgtgaccgcagtaaaagcgggcgagcaggtcatagcagccgtaaatcagatagctgacgaccaccagcccgaccgcactaagcagcgcaacgcgattgtagtcgcggatgaccttccagacctcttcccagtccacttttttggcgtagaccaccagcaacacaatcaccgcgataaaaaacagccaggtgaggatcttctttgctaagcgccagcgcgggtgacttttactcatcagggttttacccccgtgttttcagtttctacccgatcctgcgtttccattgtcggttgtgcgggcggatcaacctgcgccagacgtggcgtgtgtgccggaagccagccaaccagcgccgggaagtggcgtaaaaagtggaacgccagcacgcttttggtcaggttccaccaggtgcgtttgggcagcatggtttcatccacctgctgacaatctgcggcaataatgccgttcagattatcgcgcagcgtctggttaaaatgacgatcgtggatgatgacatttgcttcgagattcagactcaaactgagcggatcgagattactggaccctactgtcgcccagtgatcgtccatcaatgccactttgccgtggagcgggcggcggcggtactcaaaaacctgaacgccgcctttaaccagatagttatacagcaagcgcgcaccgactctgacaatcggcatatccggttcgccctgaatgatcagtttgatccgcaccccgcgccgtgccgctttacgcaaggcgtgtaaaaatcgatagccggggaagaagtaggcgttggcgataatcacttcccgccgcgcctgagtgagcattttcaaataatggcgttcaatatcatcgcgatgttcttcgttatcgcgccagaccagcaatacctgcgcttctcccggctggcggttctcttccgctttgtgatgacgtcgccaccagcgtcgtgccgcgctctgtccaggcaggttttccagctcaaactggagaatatcttcgacaatcggcccttcaaggcgtaccgcgtaatcctgtttagcctctggaccgtagctggacatatgctcggcggagtaattcagcccgccaataaaggctatacgcgcgtcgatcaccacaattttgcgatgcatccggcgaaacacattggtgcgcataccaaaaaggcgagggcggggatcgtagtagcggaacactacgccagctgccgtcagttcattgacaaactcatcgctgagatccgggctaccgtagccatccagcaagacttccgctttaaccccgcgttgcgctgctgccagtagtgccgcatgcagttgtttgccgacgtcatcctcaaaccagataaacgtttcaagaatgatgcgttcttgtgcctcgccaatcgccttaaacaccgcgggataatattgctcgccgttttccagcaactggatcttattgccttcgcgccagctacatttcataaatgaatctccgcacttaaaggggcatgatcagaaaggtgtcgccatgtccgcagcggcaacgcggttggcgcgctggcgctggcatttttgacgtagatcctgtccagtcgtagtagaggaaattgcaccggaaacgtgcgcgccgggcgtccgtgggcgcgggtaaaaatctcatccagtccggcctgcacttttaacggatgattagctttttgccgccagtcattgaaatcacccgccaccaataccggttcgccgtccggtagctcattcacccattcggcgagcatcgcaagctgcgcctgacggtgcgcctcacgcaggcccagatgtacgcacatcacatgaatcgcttttccggtcatcggcggcacaatgcggcagtagagcacgccgcgcttttccgcaccatcgacgctaacatcgcgattctcataatgttcaatgggataacggctcagtacggcgttgccgtgatgcccttccgggtatacggcattgcgaccgtaggcaaaatcgctccacatagtgtcggcgagaaactcgtagtggctggtatcgggccagttttccacatgcagcggatgaacttcgtgcgcgcccatcacttcctgcaggcaaacaatatcggcgctgacggtacgcacggcgtcgcgaagttccggcaaaatgaagcgtcggttaaacgcggtaaagcctttgtgaatattgatggtgagcaccttgaagctaaattgttgtgtttgatcgggcataattttcctgtctttgcctcttatctcattgaaatagtgtagtcggcgtcacaaaaaggtgcggtcttacggaattttccgtaaagttcggtactctgagtaagtagagataaattcttcaggagagaagccatgaagtggcaacaacgtgttcgtgtcgcaacgggtctaagttgctggcagattatgttgcatttactggtagtggcgctgctggtggtgggctggatgagtaagactctggttcacgtcggcgtgggattatgcgcactgtattgtgtcacggtagtgatgatgctggtgtttcagcgccaccccgagcaacgctggcgtgaggtggcagacgtgctggaagagctgaccacgacctggtattttggcgcagcgctgattgtgctgtggctgttgtcccgcgttctggaaaacaactttttgctggcaattgcagggctggcaatccttgccggcccggcggtagtgtctttgctggcgaaagataagaagttacatcaccttacgtctaaacatcgcgtacgccgctgattacatcaccttacgtctaaacatcgcgtacgccgcactccctgtcgtggccgttatcaccagtagcggccacaaactattccacacaatatccagactcgcatccttcaaataaatctgcttggtaatgtccgtaaagtggcgaatagggttaatccacgtcaggttttgcagccataccggcatgttttccaccggagaaacgtaaccggaaaggagaatggcgggcatcataaagacaaacacgccgataaacgcctgctgttgtgtactacagagactactaatcaacagaccgaatcccaccaggcttaaaccataaatcaccatcgtaaagtagaacagcgccaggcttccggcgaaggggatttgatacgcccagataccaatcgccagcacaatggtggcctggaaggtggcgacaattaacgccggtacggctttgccgatgaagatctgccaggtggtgagcgggctaaccagtagctgatcgagcgtaccttgttcacgttcgcgggcgacggaaagactagtgacgatcattacgccgatagtggtgatcatggcgatcagactcggcaccacaaaccatttgtagtcgagattcgggttataccagttgcgtaccaccagctcgctgttgttaggtttcggttttccttccagcagctcctgctgataatttttgacgatctgttgcaggtagttggcggcaatttgcgcactgttggagttacgcccgtcgaggatcaactgcaaaggcgcggtctggaaggtatccagtttgcggctgaagtcagccgggaaacgcaccagtagtaacgccttttgtgtgtcgatggttgggcggatctcctgtgggcttttcagcagcagcacatgagtaaaggcgctggcgcgggcaaaacgttgggtcagctccacgctatgctcgccgttatcttcatcgtagatggcgatggtggcgttagtcacttccagcgtggcggcgaacgggaacaggatcacctgaattagcacgggtaaaatcagaatcgcgcgggtttgcggttcgcgcagcaagctctgcaactctttgcggattaacgtccataagcgatgaaacatgctcttctccttaatccagccgacgtttggttttcagccacgtcaggccgataaacatcaccgcgctagcgatcaaaaacagcacgtttaccaccagcaccactggaatattcccggcgaggaacaggctttgcagggtgctgacgaaataacgagcgggaataatgtacgtcaccgcgcggatcaccgcgggcatactgtcgatctgaaaaataaagccggaaagcataatgctcggcagaaaagcggcgttcagggcgacctgagcggcattgaactggttgcgggtaatcgtggaaatcagcagccccatccccagggtactgagtaaaaacaggctggagataaaaaacagaatcagcaggctcccgcgatacggcacgccgagaataaacacactcaccagcatacacagcaacatcgccagcatcccgagaaagtaataagggatcagcttacacagcagcagttccgtgcgggtaatctccgtagagagcagagcctccatggtgccgcgttcccattctcgcgccaccaccaggctggtgagaatcgcgccgatgaccgtcatgataatggtcaccgcaccggggataatgaagtgctggctaatcgccgccgggttaaaccagtagcgggtttgtacatcaataagcggttcaaaagtctgcccgttgtcctccgctcgctgcatttgccagatctgccagatcccttcgacatacccctgtacaaagttagcggtattcggctcactgccgtcggtgatcacctgaatcggtgcggtggcgttggcgcgctccatctgttccgcaaaatccaccggaataaccaccagaccgcgaattttccccgcctgcattttggcgatcagttcctgacggttatcgctgatggtggcgtcgatgtaggggctaccggtcatggtgtgggtgaaatccagcgccgcttcgctacgctgttccagtaaaatcccgacccgcagcttgctggagtcgaggttaatgccgtaaccaaaaataaacagcagtagcagcgggatcactaccgcaatcagccagctactcggatcgcgaacgatctgccgcgtctctttaacgcacagcgcccgtacgcgacgccaggacaggatcgggttactcattgctatgctccttatcccagtcgtggatcaactgaataaaggcttgctccatggtgggatcgggttgctcatcgttagcgctctgtgctttcaaatcgtccggcgtgccgctggcgattaatttcccgcggtacaccaggccgatgcggtcgcaatattccgcttcatccataaagtgggtggtgaccatcaccgtgacgcctttctctaccatgctgttgatgtgcagccaaaattcacggcgggtgagggggtcaacgccggaagtcggttcgtcgagaaacagaatgtccggttcatgcatcaggctacaggccagcgccagccgctgtttaaaacctaatggcagttcatcggtggcgtgggaggcgatacttttcaggccgaacgcctcgctcatgcgggagattttttcgttctgcgcccgaccgcgtaagccatacacaccagagaaaaagcgtaaattctgttcgaccgtcaggttaccgtagaggctaaatttttgcgccatatagccgagatgctggcgcgctttaccggaactctctttcagatccatccccagcaccagcgcctggccggaagtcggcaccagcaaaccgcacatcatcttaaaggtggtgcttttacccgcgccgtttggccccagcaaaccaaaaatctccccacgtttaacggcaaagttgacgtgatcggtggcggcaaaatccccaaatttcttggtcagttctttcgcttcgatcaccgtctcgccgggtgtgccttctaccgtatgtaatattgcgcccagcgggctttcgctggttccggcaccgcccagcaaatcaataaacgcatcttcaaaacgcggcgtagtttcgttgatgttgatttccggcatcccgtcggcatggcgaatatcgtctggtgtggcctcttttttgaggatcagacgtacgcttttcccctgaatcatgccgtcgctgacctgcggcagtttcaaggcgcgttgcaacagtttgcggttgccctcgtgtggactggtcatcagaaagctgcgtccggccatggtttgtgtcagggcttttggttctccctgatacagcaactcgccttcgttcatcagtaacacgtcacggcactgctcggcttcgtcgagatagctggtactccagaggattaacatcccttcgcccgccagctcatgcaccatctgccacagttcgcgccgactgatagggtcaacgccgacgccgggttcatcgagcagcaacactttcggttcgcccaccagggtacaggccagaccgagtttttgtttcatcccaccggagagcttgcccgccaggcgtccggtaaacggcccaagagacgtaaactccagcaggcgagcaaaagtttgcttacgtgcctcgccggtgacgctgcgcaaatccgcgtacagattgaggttctccatcaccgtgagatcttcatacagaccaaatttctgcggcatataaccgagcacggcgtgcagcgcgccgtcgtttttgatcggatcaaagccaatcaccgtggcactgccgctgtcgggtttcagtaatcccgccaacatccgcatcagcgtggttttacctgcaccgtccggccccaccaaccccgtcacataaccggcgtgaatggtacaatcgagcggcgcgacggcgggcttgtccatgcccggaaagcgtttttccaggccgttcagcgtgataacggcatcattcatgtcctgcctcgtcaccgaattgtaccgtcactggcattccctggcgtaacgcatcatcggcgtcggtcaccacaatacgcaggcgatagacgaggtcggtacgcagatccggcgtttcgacggttttcggggtaaattcagcagtcgggctaacgaaaccaatctgcccgtgatacggcttgtccgggcgaccatcggtataaagcagcactttgcgccccggctgggcctggtcaagattacgttcatcaacataagcgcgcacccacaccggacgcgttagactaacggtaaacaccgtgccaccttcattgaggaccgtgcctggctccaccgcgcgcgttaacagcgtgccatcagacggggctatcaacgtactgtcctgtaaattcaactccgcctgcgccagttgcgcctgcgcctgttcgaggctggctttcgcctgagcgatgtcctgttcacggttaccggaacggtactgacgcaatttatcctgtgcacttttcagcgttgcctgcgcctggtcgcggctggagcgggcattttccaggtcatttgcgctaatagtgcggcttttccacaacccttgctggcggttatagaagttctgcgcatagtcataggcggcttgcgcctgtttcaccgctgcggcggcctgagcgatttcttcattgcgatacccggcaagcatcaggtcatactgcgcctgtgccacgctaacacccgctttcgcctgcatcagggcaatctcatacggcttgtgatccagttcgcccagcacctggcccgctttgatagcatcaccttcgtccaccgccaggctttcaacgcgccccccaacacggaaactaagatttaccgtacgaatatccacgttgccatacagcgtcaggccgttatcctggcggctttgataccaccagtagcctccggcaaccacggcggcaagtaccactaccgccaatccgatcacgacaggttttttcatcactacaaactcctttgcgataattacaaactcctttggcttaatccttgcaaaatcaggtcgatatgacaggtcaccgtctggttgatcagttcggtcttttcttcatcgaacgcggtccagccggtacgtaacagaattgtttctttgccaagacggaacgccagaatctcaccaatcaacgcatgggtatgaaggatcatgcgggtgtcattggcgtcgcagccggtccaggcggcaatcaggcgtgtcaggtggctgtgtagcggactaatcacctgttcgtgcaccaggtggtaggctgccgtgggagagagctgctcacgggagataaacttgctgaggttgacggtgtcatcctgggtgagcagcttaatcatgttcctgcaggcgcgaaggatcagttcacggatggcagcccgatcaggctgtggttgcgcgaacaagcgttcggcttcctcggcatgcggacggaactgctcgccaataaaatcggcaatccactgggcgcaggcgaggtacaaatcttctttgctaccgaagtagtaggtgatggcagcgatattctgcccggcctgggcggctatctcgcgagtggtggcgttcattccatattcaccaaactgcgccagtgcggcagcaatcagctgttttttcgcctgttcacccttgattgtcatggcaggattattcatcgcacagtccattcttaatcaaatgattgattaagattatgactccataggggagttgtccagtatggctaagaattttagcaacgccagtcacagggataatttatgcgctgcgtcacaaaaactgctacactccgctccctcatgacattgtggtttttgtcattttccttttcagtatctccctgaaaactacaccggtaacggtcggggcggttcggagtagttatgtctttcgattctttgggtttaagccctgatatcctgcgcgccgttgccgagcagggttaccgtgaacccacccctattcagcagcaggcgatccctgcggtgctggaaggccgcgacctgatggctagcgcccagaccggcaccggcaaaacagcgggctttacgctgccgctgttgcaacacctgatcactcgccagccgcacgccaaagggcgtcgtccggtacgtgcgctcattcttaccccgacccgtgaactggcggcgcagattggcgaaaacgtccgtgattacagcaaatacctgaacattcgtagcctggtggtgtttggtggtgtgagtattaacccgcagatgatgaaactgcgtggcggcgttgatgtgctggtggcaaccccgggacgtttgctggacctggaacatcagaatgcagtgaagctggatcaggttgaaatcctcgtcctcgatgaagctgaccgcatgctcgacatgggctttatccacgatatccgtcgcgtgttaacaaaactacctgcgaagcgccagaacctgttattctccgcgaccttctctgacgatattaaagccctggcggaaaaactgttgcacaacccgctggaaatcgaagtggcacgccgcaataccgcgtctgatcaggtgacccagcacgttcactttgtcgataagaaacgcaaacgcgaattgctgagccacatgattgggaaagggaactggcagcaggtgctggtgtttacccgtaccaaacacggcgctaaccatctggctgaacagctcaataaagatggcatccgtagtgcggcgatccacggcaataaaagccaaggtgcgcgtactcgtgcgctggctgattttaaaagcggcgatattcgtgtactggtggcaactgacatcgctgcgcgcggcctggatattgaagagctgccgcacgtcgtcaactatgaactgccaaacgtacctgaagattatgtccaccgtatcgggcgtaccggtcgtgcggctgctaccggtgaagcgttgagcctggtgtgtgttgatgaacacaaactgctgcgtgatatcgaaaaactgctgaaaaaagagatcccgcgcattgcgattccgggctatgagccggacccgagtatcaaagccgaaccgatccagaacggtcgccagcaacgtggcggcggcggtcgtgggcaaggtggtggtcgcggtcaacagcaaccacgccgtggggaaggtggcgcaaaatctgcaagcgcgaaacctgcagaaaaaccgtctcgccgcctcggcgatgccaaaccggcaggcgaacaacaacgtcgccgccgtccgcgtaaacctgccgctgcgcagtaatcttttatgccgggctatgcccggcatcaggctgatgaacaaacgcaaaactgcctgatgcgctacgcttatcaggcctacgtgaactctgcaatatattgaatttgcatgcttttgtaggccggataaggcgtttacgccgcatccggcatttcacaacaagcacttgtcagcaatttgagaacacgggaaaaaatttatctgttttaccgcccataagccaccgagacgttacttctctatagccaattgttcgcgcaactccattaaaaggtagcccagtcgattcttgcccttaccatgaccaccgtctccccagtaagcatcgttttccgtatgctcaaccagttttgcgggcgcggttgccagcaagagcgcacgcagttctgcatgctgttcgaatttagcgcgaagtgcttttcgcatcacctgttctttgacgctctcccagtttttacgcagaggcttagaacgatcgcgccccatgcgtgcggcgaccataggggaagaaacccgacggatctcttcgcggtatttttcatcaaggaatttttgtgcctgaaaatagtgttcactggtaggccaggttttcccgtcaaccttgatgggccaggcggcaaagttagaaaaatcaccgtagtcatcgctggtgctgtagaaatttatgatggtgtcttgcatgacgtgttggatcctttgtgctcgaacgggcattaaaccgcattatgttggtggttattgcgagccgctttccagaaacagaaaaaccattacccctgaaaaccgaaaaatgccacaatattggctgtttatacagtatttcaggttttctcatggcattaaccgccgcgcttaaagcgcaaattgccgcctggtataaggcgcttcaggaacagatccccgactttattccccgtgcgccgcagcggcagatgattgcggacgtcgccaaaacgctggccggagaagaagggcgacatctggcgattgaagcccccaccggcgttgggaaaacgctctcttatttgattcccggcatcgccattgcccgcgaagagcaaaaaacgctggtggtgagtaccgccaacgtggcattgcaggatcagatttacagcaaagatttaccgctgctgaaaaagatcattcccgatcttaaattcactgccgcttttgggcgtgggcgctacgtttgtccgcgtaatctgacggcgctcgccagtactgaacccacgcaacaggatctgctggcgtttcttgacgacgaactgacgccgaacaatcaggaagagcaaaaacgttgtgcgaagctgaagggcgatctcgatacttataaatgggatggtctgcgcgatcatactgatatcgctatagatgacgatctctggcgtcgtttaagtaccgacaaagccagctgcctcaaccgcaattgttactactatcgtgaatgcccgttttttgtcgctcgtcgggagattcaggaagcggaagtggtggtggcaaaccatgcgctggtgatggcggcgatggaaagcgaagcggtattgcctgacccgaaaaatttactgctggtgctggacgaaggccatcacctgccggatgtggcgcgggatgcgcttgagatgagcgccgaaatcaccgcgccgtggtatcggctacagctggacttgttcacgaaactggtcgctacctgcatggagcagtttcgcccgaagaccatcccaccgctggcgatccctgaacgtttgaatgcgcattgtgaagagttgtatgagcttatcgccagcttaaacaacattctcaatctctacatgcctgccgggcaggaggcagagcaccgttttgcgatgggcgaactgccagatgaagtgctggagatctgccagcggctggcaaaactcaccgagatgctgcgtggcctggcggagttatttcttaacgatttaagtgagaaaaccggcagccatgacattgtacgtctgcatcggttgattttgcagatgaaccgcgcgttggggatgttcgaggcgcaaagcaaactctggcggctggctagcctggcgcaatcttccggtgcaccggtgaccaaatgggcgacgcgggaagagcgcgaagggcagctacacctctggtttcactgcgtgggaatacgtgtcagcgatcagctggaaaggctgctgtggcgcagtattccgcacattattgtcacctccgcaaccttgcgtagcctgaacagttttagccgtttgcaggagatgagtggtctgaaagagaaagcgggcgaccgttttgtggcgctggattccccctttaaccactgcgaacagggcaaaattgttattccccggatgcgcgttgagccttccatcgacaacgaagagcagcatattgccgaaatggcggcctttttccgtaagcaggtggagagcaaaaaacatctcggtatgttggtactgtttgccagcggacgggcgatgcagcgctttctcgactatgtgacggatttacgtctgatgttgctggttcagggcgatcagccgcgttaccgtttagttgaactgcaccgcaaacgcgtcgccaacggtgagcgcagcgtgctggtgggcttacagagttttgccgaagggcttgatttgaaaggtgatctgctcagccaggtgcatatccacaaaatcgcttttccgcccatcgacagcccggtggtgatcaccgaaggggaatggctgaaaagcctcaaccgctatccgtttgaggtgcaaagcctgccgagcgccagctttaacctgattcagcaggttgggcgactgattcgaagccacggttgctggggcgaagtggttatctacgacaaacgcttgctgaccaaaaattatggcaagcgactactggatgcattaccggtatttccgatagagcaaccggaagtccctgaaggtatagttaaaaagaaagaaaaaacgaaatccccacgccgtcggcggcgttaatgatgtgagtcaggtaaggagtcgtaaatggactatcgcaaaatcattaaagagatcgggcgcgggaaaaaccacgcgcgcgatttagaccgggatactgcgcgcggtctgtatgctcatatgctcaatggtgaagtccctgaccttgagttgggcggcgtattgattgcgctgcgtatcaaaggagaaggggaagcagagatgctcggcttttacgaagccatgcaaaatcacaccatcaagctgacgccgccagcaggcaagccgatgccgattgtcatccccagttacaacggcgcgcgtaaacaggccaacctgacgccgttgttggcgattctcctgcacaaactcggttttcctgtggtggttcacggggttagcgaagatccaacccgcgtgctgactgaaaccatttttgaattgatgggtattacgccaacgttgcacggcgggcaggcgcaggcgaagctcgacgaacatcaaccggtgtttatgccagtcggcgcgttttgcccgccgctggaaaaacaactggcgatgcgctggcggatgggcgtgcgtaacagtgcacataccctggcgaaactggcgacgccatttgccgaaggtgaggcgctgcgtctttccagcgttagccatccggaatacattggacgcgtcgcgaagttctttagcgatatcggcgggcgggcgctactaatgcatggtactgaaggtgaagtgtatgctaatccgcagcgctgcccgcagatcaatctcattgaccgtgaagggatgcgggtgctgtatgaaaaacaggacactgctggtagcgagttactgccacaagcaaaagatccggaaaccacggcgcagtggattgagcgttgccttgctggcagcgaaccgattcccgaaagcctgaaaatccagatggcttgctgcctggtggctacgggtgaagcggcaactatcagcgacggcctggcgcgcgttaatcaggcattttaattcttttctcagccggatgagccatgtcatccggcttttaccccaccgcaatatgaaattcctgcatctttattgaccttcccacgcccggcgtgcagcataaaaatacaacaaacacataacataaacaggagttaaccatggaaagtggtcatcgctttgatgctcagacgctgcacagttttattcaggctgtatttcgtcagatgggtagcgaggaacaagaagcgaaattagttgccgatcatttaatcgcggcaaacctggcagggcatgatagtcatggtattggcatgatcccaagctatgtacgctcctggagtcaggggcacctgcaaattaaccatcatgccaaaaccgttaaagaggcgggggcggcggtcacgctcgatggcgatcgcgcatttggtcaggtcgcggcacatgaagcgatggcgctggggattgagaaagcgcatcagcacggtattgccgccgtggcgctacataacagccatcatatcggccgtatcggttactgggcggagcagtgtgcagcggcggggtttgtctctatccactttgttagcgtggtcggtattccaatggtcgcgccgttccacggtcgcgacagccgctttggcaccaatccgttctgtgtggttttccctcgtaaagataatttcccgctgttgcttgattacgccaccagcgccattgcatttggcaaaacccgcgtcgcctggcataaaggcgtccccgtgccgccaggttgcctgattgacgttaacggcgtgccgacgaccaatccggcggtaatgcaggagagcccgttgggtagcctgttgacctttgccgaacataaaggctacgcccttgcagcgatgtgtgaaattcttggcggggcgctttccggcggtaaaacgacgcatcaggaaacgttacaaaccagtcccgatgccattcttaactgcatgaccactatcatcatcaacccggaactcttcggcgcgccggattgtaacgcgcagaccgaagcctttgccgagtgggtgaaagccagcccgcatgatgatgataagccgattttgctaccgggcgagtgggaagtgaacacgcgtcgcgaacggcagaagcaggggattccactggatgcgggaagctggcaggccatttgtgatgcagcgcggcagattggtatgccggaagagacgttgcaggctttctgtcagcagttagccagctaaaaaaaaagcccgtccagtggcggacgggcaaacaagggtaacataggatcaatgagggttagagcatatgcgtctgtcggcaaacagacagggaaatacttgtgctggacgtagcgtaaacgcctgatccgtccaacggttcggattttgtaggcctgataagacgcggtagcgtcgcatcaggcatctgttgccggatgcggcgtaaacgccttatccgtcctacgaattacttataaattaccgcagtaccgcttaatttattgttgttggtggcggaagtgatgctgtatccactggcaccggctgccgcggctttctcagccagtttcgcttccagggcatcgagggtggatgcgccatcggcagaaaccacgccgattttattcatgttctgtgcctgggatgccgttaccggttccgccgcgaacacgccaaaactcagagtactaagagccatagcagcaacaacagtattgatagttttcataattaatctctcgcaggtgatttttgtataagtgacgttgtttcgtcgatgtgatgagtatcacgtttttttacgagagataaaatcgaagagaattgaccgccttgttcaaataaattgattgatatctaacctactgataaaccatttatttgttgtacttatgaacttgttttataccgcgtggcagtcacagcagcgttaaaggcacggaatgacacgcaaaatacaaattatactcgctatgcatctcgccagttgtagttaacgtaactggctgtctttgctacctctgcgattatatcctgtataagctggtttttgtaaatctttctcctgctgacaatgaatacataagcgcacgccaggaatggcttcccgacgggcctgcgggatgggggcaccgcactcttcacattcatccaggctttcgccgcgcggaatttcaccccgagcgcgggcaatcgcatcttcaattgtactgttgatctgttcgttgacggcgtcatcgttagcccaaccggatgccatatcgacctccccatatcaatacttgtacagttaagtgtagctaatccagggacgaactcgggcagttcaagcatcagatctcgctccattcccgcagcagattatgataaagattaagcaggctcaggatctcttcactttcgccgtagcggcttttcaggctctgaatattgttgtccagttcaaacagcatggcgcgctttttatcatcgcggatcatgctctggatccacataaaacttgccactcgtacgccgcgggttacgggtgtcacgcaatgcaggctgctggagggatacaacacgagatcgcctgccgggagttttacccgatgttgtccgaaggtgtcattaacgaccagttcgccgccgtcgtagctttgtggatcgcttaaaaacagcgtggcagaaaggtcagtacgcatccagccgttttgtggatggctgcgtactgcgccatccacatggaaaccataggtttcattgttctgatagcgattaaacagcggcgtggaaagggtacgcggcaaggccgcggcaaagaataaagcatgttggttaaccgcgttcagcacctcattttgcagggcggcgtataacgtgctgcgggtgtcgacctgttgattgttcttaacttgcgcaccttgtgcgccggtggtgacgcgtccatccacccattcggcttgttccagttgttcgcgaaaacgagcgacgtcctgtgggcttaacacgccgggaatgtggtacatcatacaatttctccaaaaagtggggcctgcgccccacatctgaatcagaaatgcatattggctgtgagcaagaaggttcttggctcgcccgggtgataacggtagccgctcttgttgatactggcgacgtaatcggtatcaaacaggttgtaaacgtttagctggaagtcgagattgcgattaactcgataccccagtttggcatcggcgacccagtaaccttcggtaaacgctggcgttcccaccgcgccgtcactacctttatgcatactgccgatatagcgtgcgcccgcgccaacagagatatcgtcggttgcctgatattggctccataaggtgaaggcgtgctccggggtatacggcaggctactggaaccatcctgggcaacatctttgccgtttttgatggttgctttttgctgggtatagccgccaatcacctgccacgcgggagtgatattcccggccacggatatctcatagccttcgacgcgtttcttaccgtattggctgtaagttccgtcatcattttgctcaacttcattttcgatatcagtgcggaacagcgcggcggtgagcaacagacgtttatccagaacctgccatttggtgccaatctcgctggtgttggctttttgcggtttaaaatcggtgcggttggcactgttaccgctgccagactgcgcaagggcgaagttgttgccgcccggaggctgctgggaaacggcatagttaatatagacattgccgttttccgtcaggtgatacagcgccccggctttccagttcatcagattgccgctcttggcggtgtcgacggtggtgaccggagaaccttttgccacaccagttgggcaggtgatggcaccgcgtccgctgccgccgcaggcggtggcactgtcatattcagtatgataattatccagacggatcccgccgttcagctcaaaatcacgggtgatttgcagcgtatcaaaggcgtaaattgcgaaggtatccgtctgaccattggcgtttgcgccgttgcgcgtcaggccgccgggatgaatgctgctgtcaggatgataaatatttaccgcgggtaacgtcaccggattaacgccgtagttagtctgcgtttcacgggtaaattccacgccggtactgacatcatgaccgatagaaccggtatagaacgtgctggtcaggttggtctggttggtgagaattttattactcacatctttggtattcgccgtgcgactccaggtccagctattcacatcgctggtgggctgagtaatattgctcgccccgcccataatcgccgtcatcaggtaatcctgctttacgcggctccaacgggtagtattgcgaatggtggtgttatcgttgatgtcgtgctcaaaacgcatggtggcggtgtcggtggtgctatcgtcgtaatcggaatccgtgccgtaaaagttatgagtatcaacttttccggaatgattcagggccgccgttcccgcagatggggcagaatagcccggcaaaccgatggtcggaatgccgccgtctggcgtgttgtgctgggtgacatgcagataattaagatacaaacgattcgctgtaccaaggccaaaagcgacagaaggggcgacgccgtaacgctcatttttgactttgtcgcgtccggcatcgtgcgttttttcgcccattacattcaggcgcaccgcggtggtatcaccaatgacctgattgacgtccagcgtgccgcggcggaaccaggcgctgccaatactggcggaggcgtcaatgccggaatcattgcgcggctgcttgctgatcatattgatgctgcctgtcggtgcgctgcgcccgtagtcggtgccggacggccctttaatcacttcgacctgctcggtattgaaggtgtcgcggctgacgctgccgatatcgcgaatgccatcaatataaatactgttagaggtatcggcaccacgcatataaatggcgtcgccagtggtggagttaccgttctcacccgcaaaaaacgcacccacgccggggacgtttttgagcgcgtcggtaaggttggttgcgccctgatctttaatcacttgttcagaaattaccgtcatcgtgcgggtagtatccgctaccggacggctgaatttcggatcggcagattgttgtggcgcataaaggctaggcgtacttgcttcgacaaccagcgtgtcatccgcgttagtttgcccttcggcggcgagtgcctgagccacaggcgtgatgccaatacaaagaccggcaaagaacgtgaggctatgaaattgtctggcagggaaattgcgattgttttccattttgcaggtgactttttcttatatgttgaaattttcactgccacgagaaagcctctctgcggatgcgatgccactgttaatcccgtgatagtgctcgtgaaagtgataataattttgataagcattatcacttggagcgattttctatcacccattgcgcgaaaaagaaatacatttatttacattgagttcatatttgatgttttttgattacaaaacagacgaaaactgcatccagaggcgaatgcagttacgttggtggggttatttgtagatggttgcagtaccgaacatctggtcatttccgcctgcggaattaatgacataacctttcgcgccttgttcgcgcgctttttctgccagtttatcctccagatcgcttaggttacttgcgccagttgcgctaacggtaccggcgggccgtagctgaccgctgtccaggttactcatcggttgcgcggcataagccgtgagagagattccgctcaggacggtggcaatcagtagtgtgaggcactttttcataatgacatcctcataaatacaacgggtagtgcctgataagtgtaggtcgcctgcgcgatgcaaatgacgcaaaaaattgacagagatgtgcttattttttgaacgatatatttttacaaaataagacaaatcaatgacatgcataatgctgatttttatgatgaattgccataaaccatagccatgttaaggttttggggaatgataaacgcagccagatatttaccctgtcgcgttatgcgggtatcttacgccgctgcttaaaggagaatgctatgtccgcccagaaaccggggttgcatccgcgcaaccgtcatcacagccgctacgatctcgccacgctttgtcaggtcaatcctgaactcaggcaattcctcacgcttacacccgccggggagcaaagcgtagactttgccaatccgctggcggtgaaggcgctcaataaggcgttgctggcccatttttacgccgtagcgaactgggatatccccgacggttttctctgcccaccagtaccgggccgggcggattatattcatcaccttgccgatttactggcagaagcaagcggaacaattccagcgaatgccagcattctggatatcggcgttggtgcgaactgtatttatccgctgattggcgtacatgaatatggctggcgttttaccggtagtgaaaccagcagccaggcgttaagcagtgcgcaggcgattatcagttctaatccggggcttaaccgcgccattcgtctgcgtcggcaaaaagagagtggggcgatttttaacggcatcatccataaaaacgagcaatacgacgcgaccttgtgtaacccgccattccacgattccgccgctgcggcacgggcaggtagtgagcgtaaacgccgtaacctggggctgaacaaagacgatgcactgaactttggcggccagcaacaggagttgtggtgtgaaggcggtgaagtcacctttatcaaaaagatgattgaagagagcaaaggcttcgcgaagcaggtgatgtggtttacaagtctggtatctcgtggtgaaaacttaccgccgttgtatcgtgccctgacggacgtgggcgcggtgaaggtggttaaaaaagagatggcccaggggcaaaagcagagtcgctttattgcctggacctttatgaacgacgagcagcgccgccgttttgtcaatcgccagcgttaaagcgttggttcccccggcggtaacggttcagccggggtcgcgcccggagcaggcagcacctgataagtctgcactggcgcgcgaacgcccgccaggtcgaaatgttttttcacctggctgtcgagggcaaagcgtaccgtccactgtttgagtggcagcgtggtgaagctaacacgcagtgtaaacgcggtattgcttaagccgacaatcccggcaaaattcggttcaccaataatcagcccgcgaatttcttcgttttccattaattccgctaccgcatctttcagtgcctgattggctttatcagcatcttcatggcgatcaacatcataatttgccaccacgctaccaatgccgcggacaaagttagcaaaggtggttatgctagaccacggaatgatgtgatacgccccggtatcctgtcgtacgcccacggagcgaatgctcatccgttccactgtgccggtcaacggcccgatagtcaccaaatctccagtgttcatgccgttttcaaactgaataaataccccggtgataatatctttcaccagcgtttggctaccaaagctgatagccagacctaatgccccggcacctgccagcaatggcgcgatattgacgccgatttcgctcaacacaatcatgatggtgatggtactgataatcaccgccagcgcgttacgaaacagcgtaagcagggtacgcgtgcgggcgctgggtagcgggcggccatgaatatcgctagccagccggttttcgatcaaactggcgagcaccgtccagccaaccgcgctgaagaaaagaatgagtgcgatacggatcaggatatctacggttttctgccccgcgccgttttgcagccagttccagaaatcgaacaatccccatgcgctcaacagcaacattaccgccacgcagactgtcagaatacgcgccgttttcagcgccgcgctcagccagccattcaaccgtttttgcagctccggatagttacgctgagtatgtgggctgagagtgatggttttcgccagccagcgggaaaacataccggaaacaaacgctgcgataccaataatcgccaggctgcgcaccgttgcacccatcataaatttcaggctgttgcccggatcgaacaagctaaagaaaaacagcacgataaaataggcgcttgccagccagtgccacaccagcgcaaaggcgcggataaacaggctgaaaaaggccaggctatgctccgcgaagttgagcaaatgctgggtaatctcttttttattacgaaagatcaggtacaacgcccagacggtcatgcacagcataatgatgacgttcgccagcgcacctatctgtacattcacctgattagagataatcggcacggccacaatcaggccataacctatcaaactgcttaaccagctcaggcgacgactccagtaacgggcgctctcgtcctgaatcgtgaacgggcgcagctccgccacgtttgggcaaaaaatcaggcgtagtacggctttgaaaaattcaatgagggcaaaggcgttgagaaacaaactttgttggaaagcgatggtgcgactgcctgcattcaggttgtcgcttaatacctggccgacaaataatgtcagggccagtaacagcaggtcgataataaacgccccgataatcatcgccggaagctgcaaccagttactgcgctcacgatttttttgccgcgcccactgacccattttgcgatacagcggcagtgcgcacaggcgaatcagccagtaaaaaccaaacactaataccgctaacatactaaaatgggtcagcgcattgctgaaggtttgtggattaaacggcttatgcggggagccggtgatattgcgataaagttgcccgaagcgggcggaaagggcttcaccataatggcggctgacttcggtgaccttttgcagcacggtttgctcttcgaccagcgtcggcggcactatttttggtaccggttcagcagggggcgtagcggcaacggtgcgcaactggtcgatcaactctttacggctggtgtcattatccagcacatccgccagtgcgccataggccgcttttttttgttcgatatccggttccggggccggttcagtcgtactgtccgttgtcgttgtggttgtaacgccgggtatggataccgcgtgggcaggtgcgcccagcaggcagaagaggatgaacaggatccaccgcatgactcctccagtgagaaaatagagcaaaaagataagtatagatgctggaggaggggcgattttaaatgagaggaatctggtgtgcctccctttcgggtgaaagggaggaagggatattaagcaggttgctgacaacgtgcgggcttttttgccggatgcggcgtgaacgccttatccgtcctacaagttcatgcaattttaataagttgccagatatcctgtaggcctgataagcgtagcgcatcaggcaatgtgtcttattaagagacgtgctgcaaaaattcctgcaagcgctggctcggcgggttcttgatcaacacctgcggattgccatcttccgcaatccggcctttgtcgataaagatcagccggctagctactttctcggcaaaaccgatttcgtgggtcacgatcaccatcgtcatcccttcttcagccagatcctgcataaccttcagcacttcatggcgcagttccgggtcaagagcggaagtcggttcatcaaacagcatcattttcggcttcaccgccagcgcgcgggcaatcgccacacgctgctgttgaccaccagaaagttcggaagggtagtgatgtgcacgttctgccagaccgactttcgccagcagctcacgtgccagtttttccgcctcttctttgttcgcgccacgcacgcgtagcgggccaaacatgacgttttccagcgctgtcagatgcgggaagaggtaaaactgctggaacaccatacctgcttcctggcgaatcaggcgctcgtcaactttcggatcgttaaccttcaggccatcgacaatcagatcgccggaggtgatttcttccagtttgttgatgcagcgcagcagggtgcttttaccggaaccggacggcccgataatcaccacgacttcgccctgggcaatgttcaaatcgatattgtgcagcacctgggttgggccaaagtgcttggagacgtttttaaattcaatcacaggattttcatccttctttccagacgacgcagaataaagctcagcaccagggtaataatcagatagaacaccgccacggcgctccagatctcaagggcgcggaagttaccggcaataatttcttgcccctgacgggtcagttccgccacgccgatcacaataaacaggctggtgtctttaatgctgatgatccactggttacccagcggcggcagcatacgacgcagtgccagcggtaaaatgacgtagcgaatggtttcccaacgactaagaccgagcgccagtcctgcttcacgaaaacctttgtggatagacagcaccgcaccacgcgtgatttccgcaatatacgcgccggagttgatcatgatggtgaccaccgccgcagtaaatgggtcgatgcgtaagtcgttaaacgccatcggcagggcgaaataaataaacatcacctggacgacgataggtgtgccgcggatcacttcaataaagaccagcgcgacgtggttggctatccaacctccgaaggtgcgtgcaaaacctgccagcaatccgattaccagaccgcctgccagaccgaggacgctaatccacagggtcattttggcaccttcaatcagaagcggaatggcaggccagatggcactccagtcaaactgcatatgttgttcctgttaccgtggtgtaaataatcaaattcagggtaattaatggccccggagcgggtttgcgcccctcaccctaatcctctccccataggggagagggaactgccagtgcgttttacaggtgtagcgttattatttcggttcagtaccgaaccattttttgtagatttcgttgtaagttccgttctcgcgcagggttttcaacgcgccgttgactttgtcacgcagctcgtcgctacctttcgggaacgcaataccgtattgctgcgcttccagagagtcacctaccgctttgaactgaccgttaccggcggttttgatgaagtacagaatgtttggcgtatcgtgcagaacggcgtctgcgcggttggtgcccagttccatataggcgttatcgatgttcgggaactgacgcagatctttagttttgatgtttgctttcgcgtaatcaacggagccagtaccgctcttcacagcaaccactttcccgtcgagatctttcacgcttttcacatcgttattgttagctttcaccatcactaacaggccgcttttgtagtagccgtcagagaaatcgatcgcttttttacgctcgtcggtgatggtaatgcccgccagcgccagatcgacgtttttggtttgcagtgccggaatgatcccactgaaatccatcggcttcagttcgtaatccagcttcagctctttagcgatggcagcccacagatcaacgtcaaagcccacatatttatcgccctgtttaaattcaaacggaacgaaggcggtatccgtcgcgacaactaattttttatccgcggcatgagaagaaaccgcaaaagccagggtcagtgcagccagactaacttttaatacagacttcatagcatttccttttttctatccacgggacgatcccctgcgtgacattcacatatatgaaaaaatcgtgccagttttgcaactccttgatttttcgagatgcggcaaaaacgtgatgcacgatttatagggcaataccctgaagatgcaccattctggggcaccaatctggtgcgctaaaattgtgcactcaacacagtgattatttagcgtaaaacctgatgaaaaaacaatctttatgtaacgattgtgtgatgatgtggatacaaaaaatttacttaatcagctggagatagcagatggatgcactaaataagtgcgttgaggtgggctgcaaaacaaaacggcctcctgtcaggaagccgcttttatcgggtactaaagttctgcaccatcagcgatggatttattcgatgttagactcgataaaccacaggaatttatccaggtcgcgagacgcggcggtcaggatatctgcggtgtcgtcatctttcgcttcgccaatcgctttgcgtacgtcattagcgacgattgcgtaacggtcagccagttctttcaggtgatcctgaacgttgtggatgtccagcgggtaacttttcagcggggttttgctgttgataacttgagtggtccccagagctacaccgcccagctgcactgcacgttctgccatggtatccagatgatcgatcagtgcggtgcggaagccatccagcatttcatgtacggcaatgaagttagcgccgcgcatgttccagtgcgcttgtttggtaatcaaagaaagatcaataaactggataacctggcgattcagcaactctactgttgcttttttctcgctgtcggagacatcgttgcgggtataaagcagattggtcgctttacttttaactaatttagcggtactcataatttcatatcctcttgatgttatgtcccagtaattaacgagattaagtatagcaccggctatgtgttccgctattctggctgttcctatcacactaatagtggtaacaagcgtgaaaaacaaaactaataaagattcaatgagttagatatattgataagaacaattcttatttatctgctcgccaggaattttcggaataaatatgcttttgcataattcgatatataaagacggtgtagaggaaaagtagcgagaaattctgcatggttatgcataaccatgcagaaatgtaaatttaattaatgtctaattcttttattttgctctctttgcgtactgtcagcgtagaccccatactagcggcgatgatagcgccgagcgccagtagctgtatgggtgtcagtgtttctccgaggaaaatcatcccggaaacggcagccagcgccggttccatgctcatcagcgtaccaaatgtccgtgttggcaaacgggtgagggcaatcatttccaggctataaggcagagcggtgctgagaatagcgacagccagacccaatggaataacgctccagtgccagagtgcttcaccagcctgaagcgctccaattggcacgaaaattaacgctgcaatcaagctaccaattgccaccgtcgcagggccatgttccgctcctgcgcgttgcccacttaaaatgtaaatagcccaacaagccccggcccccagtgccagcgcacagccggttaaatcgacatgggaaacgtcttgccccagcggtagcaggaaccacagaccaagaaccgccagcacaacccagacgaaatctaccgggcgacgagaagagaacagcgccaccgccagtggtccggtgaactccagcgccaccgcaatacccagcggtactgtctgaatagaaagataaaaaagataattcatcccacccaggctaacgccgtaaaacaacagcggtaaccgttgctctttggcaaagcgcagtcgccatggcttaaagaacgcgatgaggatcagcgttcctaatgccagacgcagcgcagtgacacccggtgcgcccaccagaggaaaaagactcttagctaagctggctccaccctgaatagacgccatggcaacgagcaatatgactattggtaaccagaccggcattttacgtaaactaccaggcatcctttctcccacaaatatctagacttaagtaaagcgtggagtgtactggatatacccaatgctggttgagcatttgttgaaaaaattttcccccgttttgactaaaatgcgccaggattgatggaatcattagtctggtgattaggaataatctggatgaatgacagggaaaacatgcgtaatacttacgcagttctctgaaaaagtgatttaaatttagatggatagcggtgtatggaaacgttctgttacatgaaatggcccgttagacatcacaaatcgcgaagagtttcccattaatttttgatatatttaaaacttaggacttatttgaatcacatttgaggtggttatgaaaaaaattgcatgtcttagtgcactggccgcagttctggctttcaccgcaggtacttccgtagctgcgacttctactgtaactggcggttacgcacagagcgacgctcagggccaaatgaacaaaatgggcggtttcaacctgaaataccgctatgaagaagacaacagcccgctgggtgtgatcggttctttcacttacaccgagaaaagccgtactgcaagctctggtgactacaacaaaaaccagtactacggcatcactgctggtccggcttaccgcattaacgactgggcaagcatctacggtgtagtgggtgtgggttatggtaaattccagaccactgaatacccgacctacaaacacgacaccagcgactacggtttctcctacggtgcgggtctgcagttcaacccgatggaaaacgttgctctggacttctcttacgagcagagccgtattcgtagcgttgacgtaggcacctggattgccggtgttggttaccgcttctaatcactttggtgatataaaaaatccgcctctcggggcggatttttgtttttaaggtttcgggtcgaaaatatcggttccgagatggttgtaatccaccttctgtaactggaagttggtgatgtatatcggcccggctttcttctcagatataaacgggtatttgatgttaatttccttcgctttaatccccgtccactgggagaaaaagcctaagaagtcattggcactgcggcgggctttaatcacacgatgcgctttatcgtcgctggaaatgaccataaaaggcacctggaaattttgctgatatttatcatcatgggcaaggtattgcacgtctttaccgcgctctttaaaggccagaccgtggtcagaaaagtaaaccaggctgaagctgctgccgctgttgcgtaactgatcgtacagcttgcgcagtaaatcgtccgtttgcgtcatggtatagagatagcagctcgtttctttgctttgcacaaaggtttcgtattttccttgtgtcctgtcgcaggcctgcggatgactgcccatcagatgtagaacaatcagctgcggttggctgtgctcttgcgccagcacttgagcggtcatatccagtaacgcttcgtctttggtgtttttatctgcttcaaaattaccttctttcaggaagtacacttcatctgctcgtttggcgatgctggcgatagcggtatcgtattcgccgatttgaccctggttggaaaaccaccaggtctggaagcccgcgcgatttgccagggtgacaaagttatcctgaaactgtggtttgccatcgacaacgcgattgagcgttaagccaaggcttttctgcgtggagccactggcggcaatgtagtcagcaaatatcaaaccgttaacgctgctggcaaacggggtattgtcccagtgaccgccaaaggcaccgagggcatcgcgacgcgcgctttcaccgatcaccaccacataggtctgatacttcggcttaacggcagtgaccgtccaggtatctttcattccggaaagttttgccatccgttcttgctcttcaatcacctcgttattattgacgatgacatccttagcaaaacgaaataccggatagccagtatctttcagtttaaatacgccaccccaggccaggttttgcacgggagcaacaaaaaatgtcgccacactgaataccagacacaggctgtcgaaggtattccagcgcgctttttcattctctttttttcgcctgattgctattacgccgagcgcaaaaataaataagccgaccaggtagctgtaccacggaaaaatcgtcaggatttcggtgctctcttccatattggtggagtgcaatgccagcaatgtattgaaattaggcgcgccgtaggcctgagcaaaagggaaataacaagccgccaccaggctactgacaccgaccagaactttttgtacgcgaggcaatgttcgccatagcaaaagcaaaatagccgtaaacgcagcggtgtagagcaaactgaaggggtaacctaagccgaggttaattaataggctctgtaaaaagtagaacgcagtccacgggctaaatacccggctacgggtaacaaggctttctttgagggttaaattcatatgccactatcgtaacaaacgccatgtgcttaccctggcgtcaagggtcaatacctgcaagagtgcgtgaagagtggaaaggggtccgcatccgcgagccgcaatatacgcagggctgcaagaagatagagcgagccgccgtagtggtcaactactgacgaacaaatcttttgcgaaggggattgcaaatccgacaaaaagtggggtttttcagaccaaaacgcgttatgcctgcatgaaagcaggagtgaagcggcgtaccgcgacgccgctatttatcggaaggtttatcttgctgcggtttgttgttgaccatatcgcacaacatagagagcagcattaaccgtactttaaagggagaatgactaaacacgcgcatacacctcttgaactcattcataagacctcctgacttgctaatcccgtcgatccttgaggggtgattgcattacatacagatatagcacaggctatattatatagctattgctaaaacgttaattttttgtaccttcgcaactctggtttacaatgtgcgcacgaaatgagaacgctatgtatgcgtcaccataatgaggaagcacaatgagtcgtcgcgcaggtacgccaacagcaaaaaaagtgacgcagttagtgaacgtggaagagcacgttgaagggttccgccaggtcagagaggcgcatcggcgcgagcttattgatgattacgttgagctgatttctgacttgatcagggaagtgggggaagctcgtcaggtggacatggctgctcgtctgggagttagccaaccgacggtggctaaaatgcttaagcggctggcaaccatggggctgattgaaatgatcccctggcgtggcgtgtttttaacggcagaaggagagaagctggcgcaggaaagccgcgagcgacatcagatagtcgaaaatttcttgttggtgttgggcgtcagtccggaaatcgcccgtcgcgacgcggaaggcatggagcaccatgttagtgaagagacgctcgacgcttttcgtttgtttacccagaaacacggtgccaaatgagcctgccttttttacgcacgctgcaaggcgatcgtttttttcagttattaattcttgttggtatcggattaagctttttcgtgccctttgcaccgaaatcctggcctgctgctatcgactggcacaccatcatcaccttaagcggcctgatgctgctgaccaaaggtgtggagttaagcggttattttgatgtgctggggcgcaaaatggtgcgccgctttgctacggagcgtcggctggcgatgtttatggtgctggcggcggcgctgctttctacctttctgaccaacgatgtcgcgctgtttattgttgttccgctgactatcacgctaaaaagactgtgtgagatcccggttaatcggctgattatttttgaggcgctggcagtcaacgctggtagcctactgacgccaattggcaacccgcaaaatattcttatctggggacgttctggtcttagctttgccggatttattgcccaaatggcaccgctggctggcgcaatgatgctgacgctcctgctcctgtgctggtgttgtttccctggaaaggcgatgcaataccatacgggggtgcaaacaccggagtggaaaccgcggctggtgtggagttgtctggggctgtatatcgtctttctgacggcgctggagttcaaacaagagctgtggggactggtgattgtggcggcaggctttgcgctgctggcacgtcgcgtggtgctcagtgtggactggacgctgctgctggtgtttatggcgatgtttatcgacgtccatttactgacccagcttccagcgttgcaaggcgtgttgggtaacgtgagtcatctatctgaacccgggttatggttaacggcaatcggtttaagccaggtgatcagtaacgtgccgagtaccatattgttgctgaactatgtgccgccgtctttattactggtatgggcggtaaacgtaggtggctttgggttattacccggaagcctggcaaatttgattgcgctacgtatggcgaacgatcgccgcatctggtggcgtttccatctctatagtataccgatgctgttgtgggcggcgttggtgggatatgttttgttagttatactcccggccaactaaggtctggcaaataaaaaaggcggattatgagtccgccttttgctttaagttttgaagattaattcagacgaaccggcatcccggagcggtttttaatcgcttcatcaagaacaacctggtcaacatctggctgaccggtcactgtctgcacgctcttcgtcagggtaattggcacaatttcctgaccttcaaactgggcttcggtggtagacagcgggttatggacttcaatataacggctgccgtctggctcggtggtcgcttttaccggctcatcaataaactgtacgcgggtaccgaccggtactttctcgaacaggaatttgatgtcttcgttacgcagacgcacacaaccatgacttacacgcaggccgataccgaagttggcgttggtgccatggatagcatacaggcgaccgatatagagtgcatacagccccatcgggttatccggacctgccggaacgacagccggaagcggttcgcccgcagcgcggtactctgcgtgcattttggcggtcggcgtccaggtcgggcctgcttttttacgctcaactttggtggtccagttgataggcgtatctttgcctaactgaccaatgccgatcggcagcacgataacggtgttggtccctttcggatagtaataaagacgcatctcagcactgttaatgacgatgccttcatgaacggtatccggcaggatcagctgctgcggaatgttcagtacagtaccgcctttcggcaggaaggtatccacacccgggttcgcttccatcatattggaaagccccatctggtactcggcggcaaaatactccagcggctgagtgttaccttcaggaatggtgatcacctgattctgaccaaccaggcgactcccgtcggttggcagaggataagttaccgcagaggcggtactgcaaaagccgacaacagcgaaggccgctgcgaataatgttttcaatttcatattcatgttaagcgagattttgtgcctggcaggccattgggttgagaatattagagtattggaagcgcattataagttcattccagctcacagtgaaatcagatgtgtacgaaatcacattttttgcctttggcttgagtgtagaccttaagcgaggagcaggatcttctttcagacttatggcataatgcgcggtttgtcatatctcttttcaggatacgcctgtgttagtttccagtaacgtcaccatgcagttcggcagtaagccgttgtttgaaaacatttccgtcaaatttggcggcggcaaccgttacggcctgattggcgcgaacggtagtggtaaatccacctttatgaagatcctcggcggcgaccttgagccgacgctgggtaacgtttccctcgatcccaacgagcgcattggtaaactgcgtcaggatcagtttgcctttgaagagttcactgtgctggatacggtgatcatggggcataaagagttgtgggaagtgaagcaggagcgcgaccgcatctatgctttgccggaaatgagtgaagaagacggctataaagtggccgatctggaagttaaatacggcgaaatggacggttactctgcggaagctcgcgccggtgaactgttgcttggcgtgggaattccagtggaacagcactacggcccgatgagtgaagttgctcctggctggaagctgcgtgtgcttctggcgcaggcgctgtttgctgatccggatattctcctgctcgacgaaccgaccaacaacctcgacatcgacaccattcgctggctggaacaggtgctgaacgagcgtgacagcaccatgatcatcatcagccacgaccgtcacttccttaacatggtctgtacccacatggcggatctggattacggcgagctgcgcgtttatccgggtaactacgatgagtacatgacggcggcgacccaggcgcgtgaacgtctgctggccgataacgccaagaagaaagcgcagattgctgagttgcaatctttcgttagccgctttagcgccaacgccagcaaatctcgccaggcaactagccgcgcgcgccagattgataaaatcaaactggaagaggtgaaagcctccagccgtcagaacccgttcatccgttttgaacaggataagaaactgttccgtaacgcgctggaagtggaaggtctgaccaaagggtttgataacggtccgctgtttaaaaatctcaacctgctgctggaagtgggtgaaaaactggcggtactgggtaccaacggcgtcggtaaaagtacgctgctgaaaacgctggtgggcgatctgcaaccggacagcggcaccgtaaaatggtctgagaacgcgcgcattggttactatgctcaggaccacgaatatgagtttgaaaatgatctgaccgtgttcgaatggatgagccagtggaagcaggaaggcgatgacgagcaggcggtacgcagtattctcggtcgtttgctgttcagccaggacgacatcaaaaagccagctaaagtgctttccggtggggaaaaagggcggatgctgtttggtaagttaatgatgcagaagccgaacattctgatcatggacgaaccgaccaaccacctggatatggaatccattgagagcctgaacatggcactggaactgtatcagggcacgctgatctttgttagtcacgaccgtgagttcgtaagctccctggcgacccgcattctggaaatcaccccggaacgcgtgatcgactttagcggtaattacgaagattacctgcgtagtaaagggatcgagtaagtgattatccgtcaccccgatactgtcggggtgacggcggctgatgacaaatgcaaaatagcctgatgcgctacgcttatcaggcctacgcagtacctgcaatatattgaatctgcaggactttgtaggccggataaggcgttaacgccgcatcaggcattaacaaagcgcatttgtcagcaatctgagtaacgtcgaatcgattttcttaatcccacatcaattcacttccattaattctcaaacatccatgcccaacgctcgcttaccgtgaatgttgaggtcggcaagcgtaaagcgtccttcccagtttgtttcatagtcctcgcgcgggaagtcgcccgggcttgcgcctttttccagtgcggccttcaccttgtgcgcgtaggcaagatttttctcgcacatcggtgccgcaggaatgtacatcacgttgccccaaccttgttgattttcaacgggggcaacggaatggatgacgtcgcagtgccaccagacggagtctccggcttcgagttttggaatgctggttaacgcctcaatcaacagtggatgccattgctcacttaccggcaatactcttccgggcgctacgccgcacagttcatcctccggcacatcatcaagcagcggacgtaacagtacgtacgccatagcttcaggaatgggcacgacgtgcagcagcccctgaccaggcagcatatcagagagcgctgtccagccctggaatgtccgaaacacggaacatttggtggtgttgtccaccgtgtactcttcaacttccgtacgatgtgccgcatgccagggatcatattgcgccagattgccattaaagacgttggcgaaaacgcgctgatacgctggaagcagccagcgttccagtgccccggagtcggtatgcgctccaagacctttggaggtcgttccgggcggacggcggcggatacggtcagggtagatgacgctcacatccgggttaaaccattgctttccatcactttcaaatgtccacagacgattgagaaagctctgcgcattcgccatttcttcactctggcgggcctgcatttgcgcctggctccagtagatggggtaaatctcgggacgactagcgctgagcgtcccgaagaaattatcgccggggcctttgtagacctcgtcaaagcggttgcggtccagatagtccagcatgctctgatcccagcctagcgcttgttcgcgggggaaatggccttttatcaccgcacaaccgcgacgtttaatctgttcgcgctgctctgcagtaacatgacctgctttgatatcggcataagacagcaccggccagacggcatcgccctgtgctttgagtgcgttgatttcagccactcgcgtggcaatgtcatcgcttagctgattaaagatctgctggacgtcgccaagctgcgcccgcagcgcgtgcttcatctgacggatagctgctttgtgatcggcaggcaatgtgtcgctggtaaaagtagaagccataaccacctctcattaactttcattcgaaaccattctgatttgcatgtgacaatataagttataaataagttaatgcaagtttaatgatttgatgtgatgtacaggatgtaaaaagaagggaaaaccggagcgcacggctccggtagagaggtcagctgttaaaaggggatgtgttatccagcaccgcctgaatcacattcagcgcgccttcatgattattatcatcggtagcgtaacgggcgatttgtttaatgttttccgcagcattgcccatcgcaaaggaataacgcgccattttcagcatctccgcatcgttaccgctgtcgccaatcgctaccacattttgcggactcagatcccagcgtttcagtaaccggctaataccgtttgctttatgtagaccgggaataatcaggtcgataaagccaaaaccactggtaacgggtttcataatgccatcgagcgctacgtgcagtttgtcgatcactaacgggatttgttcatccggcaggttgaggctaaacttgaacagtacgtcgtcaatctcctgataatcttttacaggtttcaggcgatggtagtgttttgccatcagtgcgacaaatgcttcgggggcattttcgctgacatatgcactttgcagaccgcaggcgacaaaattgagttgcttatcttttagcaactcgccaataacaatccggctttcatgtcgggtcagttcgccgtggaacaactgcttgccatgttcgtaaaccagtgcgccgttttccgcgacaaaagagatctcatcctttagctcaggaaagaaactaataagctggtaatactgattaccgctggcaacaacgaacttaatgccgcgctttttcagttcctgatattgcgccataaaacgtggttggttgtacgttttggcgtcgttaagaaaagtaccgtccatgtctgtgacgataacttttacgctcataggtgtgctcctggctcgaaaatgaaaccgtaacagtgtaataacaatgtgacgcagagcacaaattatatttcgaatgaaagtaaggatgaaattgatgatgtgaatgatttagcccggcgacgacgccgccgggccgaggagattacagcatatgttcagtacgggcgatgatatcgtcctgagcgtctggagagagcgcggtgaagaacgcggaatagcccgcgacacgcactaccagatcgcgatactgatcgggatgttttttcgcatccagcagcgtttcgcgggaaacgatgttgtactgaatatgccagcctttatgcacttcaaagaaggtacgcagcaggatcatcagtttctgcttgtcagattcgttctccagcgttgccggattcagtttctggttgagcaacacgccgccgagaatcgctgccgtaggcagtttacccacactgccaatgaccgcagtagggccaagatggtcagtaccggaggccgggcttgcgccttctgccagcggggtgtgggctttacgcccgtccggtgttgccatagtctgcgcgccaaacggtacgttagcggagatactactcgtacccgcgtaatagttgccgccaaccggaccacgaccgtagcgcggattatggtactgtttcagttcgtcgatataggtctgataagcgcgagccagcagcgtatcgacagtatcatcgtcgttgccgtacttcggcgcaccgttaatcagccgctgacgcagctgctcgtgagtcaggccgtcgaagtcatctgccagtgcggcagcaagctgttgctgaccaatcgcaccttgttcaaacaccagtttcttcactgccgccaggctgttgccgaggttggcaatgccgacctgcaggccagaaacccagtcatatttcgcgccgccttgcttgatacttttcgctcgctcaatacagtcatccaccagcgcgctgcagagaatatcgtgcacgttctcttccagcatggtgtcgacgacatattcgatttcgatacttttgcgggtgtagtaacggatttgcgtatcccacgcgtccatcacttcatcgaagttgttgaagttacctgcgctcaacgctttttcttgtggcaggaacactttgccgctggtggcatcatgcccgccttccagcgccgccagcatcacgcgggcgaagttgataaagctcatgccggtacagcgatagccccatttgccaccgacggcggtttctatacaaccaatcgctgcgtagtcataagcgtcctgcggttcaataccgagtttaataaattccgggatcacgatttcgtcgttgttgaacgccggcatcccgaagccgcaacggatcacctgtacgcaggcgtcgaggaaatcgttgctcattcctgcatggtaacgcacgctgaggttaggctgagtggaacgcaggcgaccgcaggattcgaggatcgcgtaagagagtggattcaccgcgtccattggttgaccatcaaccagattttgcccgccaatagtgacgttctgatacagcggacttcccgcagaggctttactgtgactgccggagcggatcttgttcacttccagcagtttcagccagcagctatgcagcatctcgatggcgtgttcgcgatccagcgtctggttgagttcaacgtcgcggcgatagtacgggtagagatactggtccatacgaccaaagcttacactgtgaccgttagattcgatctgcaaaatcaactggatgaagtaacacagttgcagcgcctgccagaaagtctgcggcggctggtgggcgataagatcgcagttttctgccatcgccagcagttcatcgcgacggctttcgcgggtttcggtcgcggccatttcacgcgccagggcagcgaaacgttcaatgtgttcactgactgccaccagcacgatatcaatcgctttcaggaattgctcaccgtgtaaatcttccagcaccgtcaggttgatgcggctgcgacgttccgctacttcctcgcgcagaccatcaagccctttttccagcagcagcgggaaattcaccgccaggtgcgcatcgccggaggtcatattgccttccgctttaatgattccggtcgccagcagacctttttgctcatcggtaaacatgccgtagcagcgatcctgtacggtctgaccgcgccaccacgggcacacttcatgcagaacgcgtttgttctcttcgctcaccgcaaagccagcaccgggacgatctgccagatcatcaatctctttttcgatccagctgacagtatattccgggaagatcggcgcggcgcgaacttcgcttgcctggttgccaatgatcaactcatcgtgtttgatccagatggtgcgattcgccaggtgatgcgccagtgccagcgcgcgacgtaccgggatcggcttatcgagatgttgttgatacatctcggtatagtgctgcgcgcgctcggtacagactggcggtttcacaatatgcaccagcgcatttttgtgcgctttaatgcggtcgctgagcgtgtccagtttcagtgtggtcatggttgttatcctcgtaaggtcgcggttaaccctttctggcaggcatactgctgggcaaagtcgagcagttctggcgcatcaagcggtttttccggggcgtcatagggcagattaagtaagtgatatttgttgatgcccagcgtgtggtagggcagaaaatgaatttcgccaacgtgcagctcgtcggcggcaaaatcggtaatggcttttacagaggtttcgtcggcattaaagccctgaatcagcggcacgcggataatgatttttttgcccgctgcggcgagttttttcaggttatccagcactctggcggcgttaccgtcggtccactgtttaaacggcgcgtcggcaacgtgttttaaatcggcaagaaacagatcgatatagggcagagaaggggcgatatatttccacggcacatgcagacaggtttctaccgcagtatgaatgcctgcctcgtggctggcttgcagtagcgccatcgccatttccggctgcataaagggctcaccaccgctaagcgttaaaccgccgccgctgcgatcgtaaaacggtttatcgcgcagaacggtcgtcatgatctcctcaacgcttttcacttcaccacacacggttaatgcctgtgtcggacagcagtcggttaacgccgtcagatgctccggggttaacttttcccgatgaataagcaaaccattcagcgcgcgctcaatcacttccggcgcggccttagcgcacagctcgcagccttccagacacagtcgtgcgtcatacagcagatcctgcgtgcgggcgcggctttccgggttctgacaccagcggcagcccaggctacagcctttaagaaatacgaccgtgcggataccggggccatcatgggtgctgtagcgctgaatattgaaaatcatagttgcctctctatttcgttcaagcattaaaatactttcgaatgaaagttagattgatgtgcgtcaactgttcagagagttttcccgtgatagtctacattcagacaaaaagtacattttgaggatggttatggaactgtatctggatactagtgacgttgttgcggtgaaggcgctgagtcgtatttttccgctggcgggtgtgaccactaacccaagcattatcgccgcgggtaaaaaaccgctggatgttgtgcttccgcaacttcatgaagcgatgggcggtcaggggcgtctgtttgcccaggtaatggctaccactgccgaagggatggttaatgacgcgcttaagctgcgttctattattgcggatatcgtggtgaaagttccggtgaccgccgaggggctggcagctattaagatgttaaaagcggaagggattccgacgctgggaaccgcggtatatggcgcagcacaagggctgctgagcgcgctggcaggtgcggaatatgttgcgccttacgttaatcgtattgatgctcagggcggtagcggcattcagactgtgaccgacttacaccagttattgaaaatgcatgcgccgcaggcgaaagtgctggcagcgagtttcaaaaccccgcgtcaggcgctggactgcttactggcaggatgtgaaagtattactctgccactggatgtggcacaacagatgattagctatccggcggttgatgccgctgtggcgaagtttgagcaggactggcagggagcgtttggcagaacgagcatttaaccggacgttctgcatcctcataaattgctgatgacgtggcggagtgccgcgtcttatcaggcctggaggtggcaattactgcccacacacctcacaccccggattacgcatcagtttcatttcgcgaaactgacaggtcatcgcatcgtacatgacgattttcccgctggccggtttgccataacctgccagcattttgatcgcttccattgcctgcaagctaccaattacgccgatcaacggtgccattacgcctgcttccacgcaggttaatgcattttcaccaaacaaacggctaaggcagcgatagcacggttcaccgtcctgataagtaaagacggtgatttgaccttccatacgaattgccgcgccggaaaccagcggtaccttcgcggcaaaacagcctgcgttcagttgattacgtaccgcaacgttatccgtacagtcgagcaccagatcgtgttcagcaatcaatgctgcaagttctgcgtcatccagcagtgcattgactggcgtaatcgcgatatgtgggttgatccgcgtcagggcgtcacgggcggattccaccttcggttgcccgaccgtggcatcactgtgcagtgtctggcgttgcagattgctgaggctaaccgtgtcgaagtcgagcagcgtcaggttaccgacaccggcgcttgccagatactggctggctgcacagccgaggccgcccaggcccactatcagcacgcgagaatctttcagcgcctcctggccgtcaaaatcaaagccgcgcagaatgatttgccggttgtagcgcagcatctcctgatcgctgagttccgccattacaggcctccgaacaacgcgttaaacggttctacttccacccattcgcccacttccacattgccgcgatcgcgttccagcacgataaagcagttgccgaggctaaaggagctaaatatatgactaccctgatgtccggtggtcgtcacttccagttcgccatcggcgttgcgttgcagcacgccgcgctggaaatcaagacgtcctggcgtttttttcaggcgggacgctgtgcgtacgcgctggcgcgcgggcaggccgctggcggtgttaccgcttagttttgccagcaaaggctgtaccagttgatagaaggtcagcgtcgcactaaccgggttgcccggcaggccgcagaaccagctattgctgagtttaccgaacgcgaacggtttacctggtttaatcgccagcttccagaaggcgatctcccccagctcttcaagaatcgttttggtgtaatccgcctcacccacactaacaccgccggaactgatcaccacatccgcctggctgtcggcttcaataaatgcggcgcgcagggcatggggatcgtcgcggataatccctaagttaattacctcgcatcccaactgttctaacatcaggtgtacggcgagacggttggtatcgtagatttggccgtcgcccagcggctgaccgggcaactggagttcatcaccggtagaaaaaagcgctacacgcactttacgaatcaccggaacttcggcaatccccagactagcaattactggcagctctgcggtagtcaggcgagttcccgccgggaaaacaaccgcacctgcagagatatcttcaccgcgacggcgaatattttgcccgctacgcacttcagcagtaaaacgcacgccattgtccatttgttcagtctgctcctgcatcaccaccgcttcgcagccttccggcaccggcgcaccggtcataatacgaatgcaggtacccgcaggccattcaccatggtatggctgaccggcaaaggatttaccggcaacgggcagcggttgcccggaggcaatatcggctaaacgcaccgcgtagccgtccattgcggagttatcaaaccccggaacatcaagcgggctaacgacatcgctcgccagaatacgaccaaaacactgtaccagtggcagcgtttcctgggcggtcagtggggtgacgcgagaaagcatctcattaagcgcggtgtcgaggctcatcaatccggtggtaaattccatgaaaacactcctgcggaggcaaaatcgaatttgcctattatgtcagaaaaacgccacagactgtatgccacctcgggcgtagcgctgggtcctgcctttacatgccatatccatctttctatattcaaaaattgaatgagtaattcataaaaattctgatatttatagcaaaagtggcgaaccacccttaatggacgaatactatgggcaaagcagtcattgcaattcatggtggcgcaggtgcaattagccgcgcgcagatgagtctgcaacaggaattacgctacatcgaggcgttgtctgccattgttgaaaccgggcagaaaatgctggaagcgggcgaaagtgcgctggatgtggtgacggaagcggtgcgtctgctggaagagtgtccactgtttaacgccggaattggcgctgtctttacgcgtgatgaaacccatgaactggacgcctgtgtgatggatggtaacaccctgaaagccggtgcggtggcgggcgttagtcatctgcgtaatccggttcttgccgcccggctggtgatggagcaaagcccgcatgtgatgatgattggcgaaggggcagaaaattttgcgtttgctcgtggcatggagcgcgtcagcccggagattttctccacgtctttgcgttatgaacaactactggcagcgcgcaaggaaggggcaaccgtcctcgaccatagcggtgcgccactggatgaaaaacagaaaatgggcaccgtgggggccgtggcgttggatttagacggcaatttggcggcagccacgtccacaggcggaatgaccaataaattacccggacgagttggcgatagtcccttagtgggtgccggatgctacgccaataacgccagtgtggcggtttcttgtaccggcacgggcgaagtcttcatccgcgcgctggcggcatatgacatcgccgcgttaatggattacggcggattaagtctcgcggaagcctgcgagcgggtagtaatggaaaaactccctgcgcttggcggtagcggtggcttaatcgctatcgaccatgaagggaatgtcgcgctaccgtttaacaccgaaggaatgtatcgcgcctggggctacgcaggcgatacgccaaccaccggtatctaccgtgaaaaaggggacaccgttgccacacagtgatgaacttgatgccggtaatgtgctggcggttgaaaatctgaatattgcctttatgcaggaccagcagaaaatagctgcggtccgcaatctctcttttagtctgcaacgcggtgagacgctggcaattgttggcgaatccggctccggtaagagtgtgactgcgttggcattgatgcgcctgttggaacaggcgggcggtttagtacagtgcgataaaatgctgttgcagcggcgcagtcgcgaagtgattgaacttagcgagcagaacgctgcacaaatgcgccatgttcgcggtgcggatatggcgatgatatttcaggagccgatgacaagcctgaacccggtatttactgtgggtgaacagattgccgaaagtattcgtctgcatcagaacgccagtcgtgaagaagcgatggtcgaggcgaagcggatgctggatcaggtacgcattcctgaggcacaaaccattcttagtcgttatccgcatcaactctctggcgggatgcgccagcgagtgatgattgcgatggcgctgagttgccgcccggcggtgctgattgccgatgagccaaccaccgcgctggatgtcactattcaggcgcagatcctgcaattaatcaaagtattgcaaaaagagatgagcatgggcgttatctttatcactcacgatatgggcgtggtggcagagattgccgatcgggtactggtgatgtatcagggcgaggcggtggaaacgggtaccgtcgaacagatttttcatgcaccgcaacatccttacacccgtgcgctgttagctgctgttccgcaacttggtgcgatgaaagggttagattatccccgacgtttcccgttgataagccttgaacatccagcgaaacaggtcccccccatcgagcagaaaacggtggtggatggcgaacctgttttacgagtgcgtaatcttgtcacccgtttccctttgcgcagcggtttgttgaatcgcgtaacgcgggaagtgcatgccgttgagaaagtcagttttgatctctggcctggcgaaacgctaagcctggtgggcgagtctggcagcggtaaatccactaccgggcgggcgttgctgcgcctggtcgaaagccagggcggcgaaattatctttaacggtcagcgaatcgataccttgagtcccggcaaacttcaggcattacgccgggatattcagtttatttttcaggacccttacgctagcctggacccacgtcagaccatcggtgatagcattatcgaaccgctgcgtgtacacggtttattgccaggtaaagacgcggctgcacgcgttgcgtggttgctggagcgcgtgggcctgttacctgaacatgcctggcgttacccgcatgagttttccggcggtcagcgccagcgcatctgcattgctcgcgcgttggcattgaatccaaaagtgatcattgccgacgaagccgttagcgcgctggatgtttctattcgcgggcagattatcaacttgttgctcgatctccagcgtgatttcggcattgcgtatctgtttatctcccacgatatggcggtggtagagcggattagtcatcgtgtggcggtgatgtatctcgggcaaattgttgaaattggtccacggcgcgcggtcttcgaaaacccgcagcatccttatacgcgtaaattactggcggcagttccggtcgctgaaccgtcccgacaacgaccgcagcgtgtactgctgagcgacgatcttcccagcaatattcatctgcgtggcgaagaggtggcagccgtcagcttgcaatgcgtcgggccggggcattacgtcgcacaaccacaaagtgaatacgcattcatgcgtagataacattcaggcggagaataaaatggcaagagctgtacaccgtagtgggttagtggcgctgggcattgcgacagcgttgatggcatcttgtgcattcgctgccaaagatgtggtggtggcggtaggaagcaatttcaccacgctcgatccgtatgacgcaaatgacacgttatctcaggccgtagcgaaaagcttttaccaggggctgttcggtctggataaagagatgaaactgaaaaacgtgctggcggagagttataccgtttccgatgacggcattacttacaccgtgaaattgcgggaaggcattaaattccaggatggcaccgatttcaacgccgcggcggtgaaagcgaatctggaccgggccagcgatccggcgaatcatcttaaacgctataacctgtataagaatattgctaaaacggaagcgatcgatccgacaacggtaaagattaccctcaaacagccgttcagtgcgtttattaatattcttgcccatccggcgaccgcgatgattagtccggcagcgctggaaaaatatggcaaggagattggtttttatccggtgggaaccggaccgtatgaactggatacctggaatcagaccgattttgtgaaggtgaaaaaattcgcgggttactggcagccaggattgcccaaactggacagcataacctggcgtccggtggcggataacaacacccgcgcggcaatgctgcaaaccggtgaagcgcagtttgctttccccattccttacgagcaggccacactgctggagaaaaacaaaaatatcgagttgatggccagtccgagtattatgcagcgttatatcagtatgaacgtgacgcaaaagccgttcgataacccgaaggtccgtgaggcgctgaattacgccattaaccgtccggcgctggtgaaagttgcctttgcgggctatgcaacgccagctactggtgtggtaccgccaagtatcgcctacgcgcaaagttataaaccgtggccttacgatccagtgaaagcgcgcgaattactgaaagaggcgggatatcccaacggtttcagtaccacgctgtggagcagtcataaccacagcaccgcgcagaaagtgctgcaatttacccagcagcagttagcgcaggtcgggattaaagcccaggtgactgcgatggatgccggacagcgggcggcagaagttgaaggtaaagggcaaaaagagagcggcgtgcggatgttctacactggctggagcgctagtaccggcgaagcggactgggcactaagcccgctgtttgccagccagaactggccaccgacgctgtttaataccgcgttttacagcaataaacaggtggatgacttcctggctcaggcactgaaaactaatgatccggcggaaaagacccgcttatataaggcggcgcaggatatcatctggcaagaaagcccgtggatcccgctggtggtagaaaaactggtgagcgcacacagtaaaaacctgaccggtttttggatcatgccagacaccggcttcagctttgaagacgcggatttgcaataagcaacgcagggagtggaatgcttaattacgttatcaaacgcttactggggttgattccgacgctgtttatcgtcagcgtgctggtgtttttatttgtccatatgctgcccggcgatccggcgcgattgattgccgggcccgaagctgatgcgcaggttatagaactggtgcgtcagcagctggggttggatcagccgctgtatcaccagttctggcactatatcagcaatgctgtgcagggggattttggcctgagcatggtgagccgtcgtccggttgccgatgagattgccagccgctttatgccaacgctgtggctgaccataaccagtatggtctgggcggttatatttggtatggcggcgggaattatcgccgccgtctggcgtaaccgttggccggatcgattgagtatgaccattgcggtgagcgggatcagctttccggcatttgctctggggatgcttttaattcaggtattctccgttgaactgggctggctgcctaccgtgggagcagacagttggcagcactacattttaccctccctgacgctcggcgcggcagtggccgccgtgatggcgcgctttacccgcgcgagctttgtcgatgttttaagcgaagattatatgcgtaccgcgagggcgaaaggggtgagcgaaacctgggttgtcctcaaacacgggctacgtaacgcgatgatcccggtagtgaccatgatgggcttacagtttggctttttgctcggtggttccatcgttgtggagaaagttttcaactggccgggacttggacgcttactcgttgactccgtagaaatgcgtgattacccggtgattcaggcggaaattctgcttttcagcctggaatttattcttatcaacttagtggtggatgtgctttacgccgccattaacccggctatcaggtacaagtaaggatgcgactatttaactggcgacgtcaggcggtgttaaacgccatgccactggtcaaacctgaccaggtacgtacaccgtggcatgaattctggcgacgatttcgccgtcagcatatggcgatgaccgccgcattattcgttattttattgattgtggtggccatttttgcacgctggatcgctccctatgacgccgaaaattattttgattatgacaatctgaataacggaccttctttgcagcactggtttggcgtcgatagtctggggcgtgacattttcagccgtgtcctggttggtgcgcaaatcagcctggcggcgggcgtgtttgccgtgtttatcggtgcggcgatcgggacgttgctgggcttgctcgctggatattatgaaggctggtgggatcggctgatcatgcgcatttgcgatgtgctgtttgccttcccgggtattttactggcgatcgctgttgttgcggtgttgggaagcggcattgctaacgtgattattgcagtcgccattttttccatccccgcgtttgcccgcctggtgcgcggcaacacgctggtgttgaaacagcaaacctttattgagagtgcacgcagtattggtgccagcgatatgaccgttttgttgcgtcatatcctgcctgggaccgtctcttctatcgtggtgtttttcaccatgcgcattggtaccagcattatctctgccgccagcctcagttttctcggcctcggtgcgcagccgccgacaccagagtggggagcaatgctcaatgaggctcgagcggatatggttatcgcgccgcatgtcgctgtttttccggccctggctatttttctgaccgtactggcgttcaatttgttgggcgatggtttacgcgatgcgctggatccgaaaattaaaggataattacgtttgaatattgcttgaaagggtaatcacctcacaggaaattattgccctaagcaagtgttgtaactttctgctgattttgtagaatcgggtaatttggttaaaaagccgcagcaagggacaatttttgcagcggcacagcgttcagatagttattttgttaaatgtattaacatgctgagtttatacgaaaagataaagataaggctgataattttatttttattggcagcactgagttttattggtctttttttcatcattaactatcaactggtaagcgagcgcgcggtaaaacgtgccgatagccgctttgaacttattcagaaaaacgttggctatttctttaaagatattgaacgtagcgccctgacattaaaggacagtctgtatttattaaaaaatacagaggagattcaacgcgccgtgattcttaaaatggaaatgatgccatttttagacagcgtgggactggtacttgatgataataaatattatctttttagccggagggcgaatgataaaatcgttgtttatcatcaggaacaagtaaatggaccgcttgtcgacgagagtgggcgggttatttttgccgattttaacccaagcaaacgaccgtggagcgtggctagtgatgactctaacaacagctggaatccggcatacaattgctttgatcgtccgggtaaaaaatgtatctcttttacgctacacatcaacggcaaagatcacgatttgttagcggtggataaaattcatgtcgatttaaactggcgatatctgaacgagtatcttgatcaaatcagcgctaatgatgaagttctatttttgaaacaaggccatgagatcattgccaagaatcaactcgctcgtgaaaaactgattatttataatagcgaaggtaattataatattattgattctgtcgatactgaatatatcgaaaaaacaagtgcggtgccaaacaacgcattattcgaaatctatttttattatcctggcggtaatttattgaacgcaagtgataaacttttttatctgccgtttgcgttcattattatcgtattgctggtggtttatttaatgaccactcgtgtgttccgtcggcaattttctgaaatgacagagctggttaatacgctggcgtttttgcctgacagtacggatcaaatcgaggctctgaaaattcgtgaaggcgatgcgaaagagattatcagcatcaaaaatagcatcgcggaaatgaaagatgccgaaattgaacggagtaataaattgctcagtctgatctcttacgatcaggaaagtggttttattaaaaatatggcgattattgagtctaacaataatcagtatctggctgtggggatcatcaaactgtgtggtctggaagccgtggaagcggtgtttggtgttgatgagcgcaataaaatcgtcaggaaattgtgtcagcgaattgccgagaaatatgcgcaatgctgcgatatcgtgacattcaatgccgatctctatttacttctgtgtcgggaaaatgtacagacatttacccgtaaaatagcgatggtaaacgattttgacagcagctttggctaccgcaatctgcgcatccataagtctgccatttgtgaacctttgcagggggaaaacgcctggagttacgcagaaaaactgaaactggcgatttccagtatccgtgaccatatgttcagtgagtttattttctgtgatgacgcgaaactcaacgaaatagaagagaatatctggattgcgcgtaatattcgccatgcaatggaaattggcgaactattcctcgtctatcaaccgatcgttgatattaacacccgcgccattctgggcgcggaggcgttgtgccgttgggtgtctgcggagcgggggatcattagtccgctgaagttcattaccattgctgaagatatcgggtttatcaatgagctgggttatcagattattaaaacggcaatgggtgaattcagacattttagtcagcgtgcgagcctgaaggatgatttcttactgcatattaatgttagcccctggcagttaaacgaaccacactttcatgagcgttttaccaccatcatgaaagaaaatggcctgaaggcgaacagcctctgtgttgagatcactgaaaccgtgatcgagcgaattaatgaacatttttatctcaatattgaacaactgcgtaaacaaggggtacggataagcattgatgactttggcaccggtttgagtaacctgaaacgtttttatgaaattaatccagacagcataaaggtggacagccaattcaccggcgatattttcggtactgcgggaaaaattgtgcgcattattttcgacctggcacgctataaccggatcccggtgattgcggaaggcgtagagagcgaagacgttgcgcgcgaattaatcaaattaggatgtgttcaggctcaggggtatctgtaccagaaacccatgccattctccgcctgggataaaagtggaaaattagtaaaagagtaatttacgtatgtccagaatcaataagttcgtacttacagtcagtctgctgatttttatcatgattagtgcagttgcctgcgggatctacactcaaatggtaaaggaacgggtgtatagcctgaaacagtccgttattgatactgcttttgcggtggcaaatattgctgaatatcggcgtagcgtggcaattgatcttatcaacacgctaaatcccacggaggaacagctgttggttggtttgcgcacagcttacgccgacagcgtttccccctcttatttgtacgatgtcggtccttatctgatttccagtgacgaatgtattcaggtaaaggagttcgagaaaaattattgtgcagatattatgcaggttgtgaagtatcgacatgtcaaaaatacagggtttatctcttttgacggtaaaaccttcgtctattacctctatccggtaactcacaatcgtagtctgatatttttgcttggtctggagcgtttttctttactgagtaaaagcctggcgatggacagcgagaacctgatgttctctctatttaagaacggtaaaccggtgaccggtgatgaatataatgctaaaaacgccatcttcaccgttagcgaagcgatggagcacttcgcctatttgccgaccggattgtatgtatttgcgtataaaaaagatgtttatttgcgggtttgtacattgattattttctttgccgcattggtggcagtgataagcggtgccagttgcctctatctggtacgcagagtgattaatcgtggtattgtggagaaagaagccatcattaataaccattttgaacgcgtactggatggcgggcttttctttagcgctgccgatgtcaaaaaactctacagtatgtataacagcgcgttcctggacgacctgaccaaagcaatgggcagaaaatcctttgacgaagatttaaaagcgctgccggaaaaaggcggttatttgtgcctgtttgacgtcgataaattcaaaaacattaacgacaccttcggtcatttgctgggcgatgaagtgttgatgaaagtggtgaaaatccttaaaagtcagatcccggtagataaaggtaaagtctaccgcttcggcggtgacgaatttgcggtgatttatacgggtggaacgctggaagagttgctaagcattctaaaagaaatcgttcatttccaggtgggaagcattaatttaagtaccagtatcggtgtagcacatagtaatgaatgtcctaccgtcgaacgcttgaaaatgctggcggatgagcggctgtataagagtaagaaaaacggcagggcacagattagctggcagtaatcattattcgcaggccggacaaatgattttgcccggcctgaattaattaaacccggctaccccacaaatcgtactcatcggcgtgctcgactttcacacgcaggatatcacccggcttaacgttggtttcaccattgagataaaccgcgccgtcgatttccggtgcatctgccatgctgcgaccaatcgcgccttcttcgtccacttcgtcgataatcaccagaatttcacggcccactttctcttgcaggcgctcggcggaaatctgctgctgcagctgcatgaaacggttccagcgttcttctttaacttcttccggaacctggtcaggcagggcattggcgtctgcaccttcaaccgggctgtatttaaagcagccaacgcgatccagacgcgcttctttcaggaagtcgagtagcatctggaaatcttcttctgtctcgccagggaagccgacaataaaggtactgcgtagggtcagttccgggcagatttcgcgccactgtttgatgcgcgccagttggcgatctacagaacccggacgcttcatcagtttgagaatgcgcgggctggcgtgctgcaacggaatgtccagatacggcaggattttgccttctgccatcagtgggatgacgtcgtccacatgcggataagggtaaacgtagtgcagacgtgtccagatccccagtttgcttaactgttcgcacaggctgaccatgctggtttttaccggctcgccgttgtggaagccagtacgatgtttaacatcaacgccataggcggaagtatcctggctgatcaccagaatctctttaacgcccgcatctaccagacgtttcgcttcacttaacacttcgccaatcggacggctcaccaggtcgccgcgcatagacggaataatgcagaaggtgcagcggtgattacagccttcagaaattttcagataggcataatgacgcggcgtcagtttcacaccttgttctggcaccaggctcaggaatgggttgtgtttcggttttggcacgtagtgatgaacgtgctccagaacctgctcatagctatgaggcccggtgatttccagcactttcgggtggacttcgcggatctgatcttcttttgcccccagacaaccggtcacaataaccttgccgttttcattcaacgcttcaccaatggcttccagactttcttgtaccgcgctgtcaataaagccgcaggtgttgacgatcaccatgtccgcatcgtcatagctcggtaccacgtcataaccttcagtgcggagttcggtgagaatacgctcactatcaacaaggtttttcggacagccaagggaaacaaagccgattttcggctggggagttactttgctcatagcttaaaaaatattcagttacaggaaaggtcagggcagggattctacagagttctggataaaatttgtatcgcaatctcattcgctggcggaggcgaaggaaatgtaaattttgttaattcggcgtgaagaattgatcctggacagcattttgctcaaaaaatagccatactatttaattgcaacaaggctgggaagaggaggatcgaagtatgttcgttgacagacagcgaatcgatctgctgaaccggttgatcgacgcacgcgttgacctcgccgcatacgtgcaactgaggaaggcaaaaggatacatgtccgtcagcgaaagcaatcatctacgagataacttttttaaactgaatcgcgaactgcacgataaaagcctgcggttgaatcttcatctggatcaggaagagtggagtgctcttcatcatgctgaagaagcattagcgacagccgcagtatgtttgatgagtgggcaccatgattgcccgactgttattaccgtcaacgccgataagcttgaaaattgtctgatgagcttaacgctgagtatccagagcctgcagaagcacgccatgcttgagaaggcctgaaaactaagggggagaaagcgtctcccccttcatgtttaagtttttgtaaaaatgaatttgttatctcctccactgactacgctttaagccagagtcaatccggaggcgttatgcatcgacaatcctttttccttgtgccccttatttgtctttcttccgctctctgggcggctcctgcaacggtaaatgtcgaagtactgcaagacaaactcgaccatccctgggcactggcctttttacccgataatcacggtatgttaatcactctgcgcggcggcgagttgcgtcactggcaagcaggaaaaggattatctgcgccgctttccggagttccggacgtttgggcgcacgggcagggcggcctgctggacgtggttttagcgcctgattttgctcagtctcgccgcatctggttaagttattccgaagttggcgatgatggcaaagccggaactgctgtgggttatggccgcttaagtgatgatctcagtaaagtgaccgacttccgcaccgtctttcgccagatgccaaaactgtctaccggcaaccattttggcgggcggctggtattcgacggtaaaggttatctttttattgctctgggcgaaaacaatcagcgcccgacggcgcaggatctggataaattacagggcaaactggtgcgtctgaccgaccagggcgaaatcccggatgataatccttttataaaggaatccggtgcgcgcgccgagatctggtcttatggcattcgtaatccgcaaggaatggcgatgaatccgtggagtaatgcactgtggctgaatgaacatggcccgcgcggtggtgatgaaattaatatcccgcaaaaaggcaaaaactacggctggccgctggcaacctggggaatcaactatagtggctttaagataccggaagcgaaaggggagatcgtcgccgggaccgagcaacctgttttttactggaaagatagccccgctgtgagcggcatggccttctataacagcgataaattcccccagtggcagcaaaaattatttattggcgcgctgaaagataaagatgtcattgtgatgagcgtcaacggcgacaaagtgacagaagatggccgtattttaacggacagagggcagcgaattcgtgatgttcgcactggacccgacggttatttatacgttctcaccgacgagtccagtggggaattacttaaagttagcccacgcaattaactaacgggaatcatcaccactttgcgcactgcggggcgttcagtgagttgctgataccagcgttgcagatttggacgcggtgtccaggtcaggccaacgttaaacaaattgtagatgaacggtgcgatagcgatatcgcccacaccaaactcgtcgccagagaaccattttacttttgccagttccgcatcgagcagggcaaacagggcgtcgcactctttgcaactggcatcaatggcggcctgatcgcgctcttccggtggtgttctgactaatcccatcaggatcccgcgatgagcattactgagcgtctggtttgcccagtccatccatttttccgcttccgcacgacgtgccggactgtcgatccacaggcgtttttgcccgtactgtgccgccagatagcggacaatggcgttactttcccaaagaatgagatcactttcgtcgtcacgcaacaacggcaccagcccgttagggttcatcgccagaaaatcagcatcgtgatttatcccaaactcacggcccgcgagaatttgctcataaggtagttccagttcttcgagcgtcagcaatactttttttacgttagtactattattccgaccccacagcgtaatcatactcaccccttttccgacaggcagccacaggctgaacaggactccgatggtgaagtaaagttaacttttaagcaacagctggcaaaaaaatgacaccagaagcagcgaagcggcaggatattgcataaactttaaaaactttaccaacttacggtttctttaagtttgtgtgtgcgttattaatcaccaaacttatcatacggcgatataacgtattttttttgaatggatactcgggtggcatttatgacgcaatactcctctctccttcgtggtcttgcagcgggttctgcatttttattcctttttgccccaacggcattcgcggcggaacaaaccgttgaagcgccgagcgtggatgcgcgtgcatggattttaatggattacgccagcggtaaagtgctggcagaaggcaatgcggatgagaaactggatcccgcgagcctgactaaaatcatgaccagctatgtggttgggcaggcgcttaaggccgataagattaaactcaccgatatggtgacggtcggtaaagatgcctgggcgacgggaaatccggcactgcgtggtagtagcgtaatgttcctcaaaccgggcgatcaggttagcgtggcagacttgaacaaaggtgtgattatccagtccggtaatgacgcctgtattgcgctggctgattacgttgccgggagccaggagagttttattggtctgatgaatggttatgccaaaaaactgggtctgaccaacactaccttccagacggtgcacggcctggatgcgccggggcagttcagcaccgcgcgcgatatggcattgctgggtaaagcattgatccacgatgtgccggaagagtacgccattcataaagagaaagagttcaccttcaacaaaattcgtcagcctaaccgtaaccgtctgctgtggagcagcaatctgaatgttgatggcatgaagacaggaaccacggcaggcgcgggatataatctggttgctagcgctacccagggcgatatgcgtttaatctccgtagtgttgggggcgaaaaccgaccgtatccgttttaatgagtctgagaaattattgacctggggtttccgcttctttgaaaccgtgacgccaattaaacctgatgccacctttgtgactcagcgcgtctggtttggtgataagagcgaagtgaatctcggggcaggtgaagcgggcagtgtgaccataccgcgtgggcagctgaaaaacctgaaagcgagttatacgttaacggaaccgcagcttaccgcaccgctgaaaaaaggtcaggttgtcgggaccattgatttccagcttaacggtaaatccattgagcagcgtccgctgatcgtgatggaaaatgtggaagagggcggattctttggtcgggtgtgggatttcgtgatgatgaaattccatcagtggttcggcagctggttctcttaatcttctgataaccggatggcgcgaaacgtcatccggttatacgtcattaatacatcaacttaatgcgctgcgtctgcgcgtacttcacatactcatcttccgggcaacaatcgctcaccacaatatcaaagcgtttcaggtcacccatgcgcgccggacgcaccttgccaaatttactgtggtcgacaaccagcacatgcttttgcgccatgctcatggcccagtgttttaccggcaactcttcaagattaaaacaggtagcgcctttactgacatgcacgcccgccgcagaataaaaagcgatatccgggcaaaaattattcagcgtttgctgaaaatcgatgggtttgaaaatggcgttgctggcgtgaaattcaccaccgcaaagaaacgcgcggcaatggggtttctctttcagcgccagaaaggtatttaggctataacaaacggcggtaaaagggatttcattatcaatcgcttcaataatccacggcgtggtggtgccacagtcaaaaaagagggtctgatcgggttctaccagcgtcgcagccagttttgccgcccggcgtttttcttccaccaggcgggatttttgatcgcttaacaggtaatggctggcactgcgcggttccagaacaatatagccgccgagcaaaacgacgggcgcactgtggttgttcagatcgcgacgaatcgtcatctcgctaaccccaagcagggcggcggcgtctttaagatgtaacttatcgctgcgttttaattcttgcagcagctgcccgatacgctcttcgcgacgtgtttccataatccctctgaatagttattgaagcgagccgctcaatactacactttttagcagagatcagtcacgcacccagcctttgcggatcggtaatgcaaaacagacgcgataccagctttgcagacgttgatagagtttatgccccatcgcttgccagataatctgggcactaaggcagccaatcatacctgccagcaatccaccgagcatatccagcggccagtggacgccaagataaacgcggctccaggcaatgacgacggccagcaccattaaaagactgccggaccacaggcgatgccagcataaaaatgccagtgcaaaggtgaaaatcaccgtaccgtgatcgcttgggaaactgtcatccgccgcatgatgcaggaagttatagccgatattttcgacaaagggtcggtcgtgcggaaaaagatgtcccatcgtccaggacacaaacaggctgaccgccagcgcgatagcgatttttatcaccagttgccgttgtgctgtaagcccccacaaccaaagtaccacggccagcaacggcaccacggtaatcaaatctttagcaataaaaatcgccaagctgatcatccacggagcgctgtctggcgtcgcgttaataagagagaatagagagagattcaaattttccagcataacttcccgacgcaaagtgattaaaagggagccaatacaggcaagtcgttgagaataaagtgcaggttaaactgggtaaagcggcatcgtcttatttccctcaagcggcctgtttacggtgggtgattgtaacgggcataggttaaataaaacttaaagaaagcgtagctatactcgtaataatgtaagaatgtgcttaaccgtggtttcagctacaaaattcgctttctcgttagctgcgcttttattaaactctgcgcgattattattggcgaagaaattgcatgcaaaataaattagcttccggtgccaggcttggacgtcaggcgttacttttccctctctgtctggtgctttacgaatttagtacctatatcggcaacgatatgattcaacccggtatgttggccgtggtggaacaatatcaggcgggcattgattgggttcctactagcatgaccgcgtatctggcgggcgggatgtttttacaatggctgctggggccgctgagcgatcgtattggtcgccgtccggtgatgctggcgggagtggtgtggtttatcgtcacctgtctggcaatattgctggcgcaaaacattgaacaattcaccctgttgcgcttcttgcagggcataagcctctgtttcattggcgctgtgggatacgccgcaattcaggaatccttcgaagaggcggtttgtatcaagatcaccgcgctgatggcgaacgtggcgctgattgctccgctacttggtccgctggtgggcgcggcgtggatccatgtgctgccctgggaggggatgtttgttttgtttgccgcattggcagcgatctcctttttcggtctgcaacgagccatgcctgaaaccgccacgcgtataggcgagaaactgagtctgaaagaactcggtcgtgactataagctggtgctgaagaacggccgctttgtggcgggggcgctggcgctgggattcgttagtctgccgttgctggcgtggatcgcccagagcccgattatcatcattaccggcgagcagttgagcagctatgaatatggcttgctgcaagtgcctattttcggggcgttaattgcgggtaacttgctgttagcgcgtctgaccagccgccgcaccgtacgtagcctgattattatgggcggctggccgattatgattggtctattggtcgctgctgcggcaacggttatcagtagccacgcgtatttatggatgactgccgggttaagtatttatgctttcggtattggtctggcgaatgcgggactggtgcgattaaccctgtttgccagcgatatgagtaaaggtacggtttctgccgcgatgggaatgctgcaaatgctgatctttaccgttggtattgaaatcagcaaacatgcctggctgaacgggggcaacggactgtttaatctcttcaaccttgtcaacggaattttgtggctgagcctgatggttatctttttaaaagataaacagatgggaaattctcacgaagggtaaaaaaatgcctgactgctttgtgcgatcaggcattctcgaattaatggtgatggtcgtcaatctggtgttcgataaccatcccttcacctacgctggcaagatggcgaacataaggatgcgggcggtaagccggagctggcgcaggagccacatagacggtttgcggcacagtcgcgacgctgaccgcttgtggaacgctgacactatcaggaaccacaaccactttgtatccactcggcacatcgacggtgacactttgcgccatcgccacaccagtaaagcccattaaaagcgcgcccaacagtagacaatttttcataatcatttcgcctgaaataatgcagcgggttaatttccgcgaattatgcagccttcattcaggcattgtgttgccgggcgtgctgccggttttattggtcaaatggcgcttcgtgtttaagaactttatcgatcacatccagtacgccttcacggttattggagcctgcgcggtattttgccgctgcgacgaccgcgctaccggcattttccattgcaaaactaaagcctgcctgacgcagcatctcaatatcgttaccgccatcgccaaagaccaccacttcgctgtcgtctattccccataatttctgcagttggcgaaggccattggctttatgtacgccggggataatcagatcgatgctgccgttgccggtgtggacgctcaccataatatcgccgatggcctcatgtaatgctttttgtacttgtggaatcagttcatcggaaagattcaggccaaacttaaagaagatatcctctaagttgtcaaagttatcgacgtattccagacggtgataatacatttccgccaccgttttcatggcatcgtcatattttttgagtgtataggcactattttttccgcaggcaataatttccacttccgggcgcgtcagcaaatgttccacgacagtagcaaacgcatccttgcttagctcgccattaaaaacatctttgccttcgctcactacccagccgccgttttcagccacaaaggcaatttcattagcaatttcagggaagaaagagatcaactgataatattgattcccgctggcgactacaaagcgaattccttgtgctttcatttgctgatactgagccataaaccgctcacggttataggttttttgatcgcttaagaaagtaccatccatgtctaccgcaattaatttaatgctcatcaactattctccatcgccgtctgcgttttggtatcgggtttggcgacggctttcgcgacaatagccgcgagaataaccagcgccagtacaaccagcattgcactacgtaatccataatgttcgccgagatagcccagcagcggcggcccgacgaggaaagccagataaccggtcgttgctaccacactgacgcgggttggtgcatcggggccggtatcgctggcggcagaaatggtcagcgggaagcccaggctggcacccagtccccagagtacaacagacaccccagcgacccaggcgctatcgacaaaaataatcagcccaatacccaacgcccccattagtgcactggcccgaaccacggcaacgcgactgtaacggtcgatgaaccaaccgccggtgaagcgtccaacggtcatccccagggtaaaaccggcataaatcaggctgccggaagtagggctaaaaccgtgaccgtcaaccattaataagggtaaccagtcgttggcagaaccttcggcaaaggccatcgccagcaccacaacacctatcagcagcaactggatatcgcgataaaaaggtacgcctttttcgccatgctgggtgccatcggcagcatttttgcccgtaccgtcagggattgcctgaatggcgatataaataggtgcgatacctaccagcgccgccaataaaatgtgcaccgttgccggaacgccaaaggccgtcagtgccatcccgacacctgcgcctgccagcgtgcccaggctataaaaaccgtgcatcatcggcaaaaccgtcttattcatttctcgctcaacggcagcaccttcaacgtttatcgccacttccgcagaaccaaaacttgccccaaagacgccgagaccaacggcaaagagcagggggcttgtcagccagagtgccagacttaatatcatcatcccgatcaatgcgcaggacatcgtgaccaggatgacattacgtgtcccaaagcgtttcactaaccacgcgctgcagagaataccgctcatgctaccgatgctcagaccaaagagaacaccgcccatttcagcgatgctgacagagagaatatcgcggatagcaggcgtacgggttgcccaggacgccattaacaggcctggcaaaaagaagaacataaacagcgcccaggttcggcgtttcaatgcattacgactagaatttacggtcatagatcacgtcaaaataagaagagggaagacaacattagcaaggttgtgtacatttgtacacaattgcagagagaggaaatgacatgcgtcgcgctaacgatccgcaacggcgagaaaaaattatccaggccacgctggaggcggtgaaactttacggaatacatgctgttacgcaccgcaaaattgctacccttgccggggtaccgttgggaagcatgacctactattttagtggaattgatgagttgttactggaggcgttcagcagttttactgagatcatgtcccggcaatatcaggcattttttagcgatgttagtgatgctccgggcgcatgccaggctatcaccgatatgatctacagcagtcaggttgcaacgccggataacatggagctgatgtaccagctctacgcgctggctagccgaaaaccgctattaaaaacggtaatgcaaaactggatgcagcgcagtcagcaaacgctcgaacaatggtttgaacccggaaccgcccgcgcgcttgatgcgtttattgaggggatgacgctgcattttgtcaccgaccgtaagccgctaagccgcgaggagattttgaggatggttgagagggttgcagggtaatagataagttttagataacaaaaaacccatcaaccttgaaccgaaatggcggggttgatgggctccacaaaatggggacatcaaagaaaagcagtggcactaattaagactgatgccctgcggaaaagttctgcggttgtgcaaaaaaatttcattttcagggcaacttcagttttatcctaatcctggccataccatgacgatgattgtccctgccagcgtcagcaggacgttggcgattgcataggtgcccgcatagcccagcgccgggatgttactgcgagctgtatcactgatgatctccattgccggcgcgcaggtacgtgcgcccatcattgcgccgaacaacagcgcgcggttcattcgcaatacataagcaccgaacaagaaacagataaccacgggcaccagactgacaatcaatccggcaatcaacatctgaccgccaatcgcgcccaggccgttattaataccgctaccggcgctcagaccaacgcctgccataaacaccatcaagccgaactctttcaccatgcttaatgcaccctgcggaatgtaaccgaaggtcgggtggttagcacgcataaagcccagcataattccggcgaataacaacccggcagcgttccccatgccgaaactgaatgtgctgaactggaaggtgatcatcccgatcatcagcccaataacaaagaaggcgcagaatgccagcaggtcagtgacctggctgtgaatgctgataaagccgatgcgatcggcgatggtttttacgcggcgggcatcgccgctgacttgtaaaacgtcacctttgttaagcacgacgttgtcatctatcggcatctcaatctggctacgaatgacgcggttaaggaagcaaccgtgatcggtcaacttcagttgtgcgagacgtttacctacagcgttatggtttttaacgaccacttcttcagtgacgatacgcatgtcgagaaggtcacgatcgaaaacttctttaccgttacggaagctgggatcgagtcgggcatgggcgtcgggatagcctaccaacgctatttcatcgcccatttgtagcacggcatcaccgtctggatttgccagaatcccgttacgtcgaatacgttcaatgtagcagccggtttgtcgataaatacccagttcacgcagatttttgccgtcggtccaggccaccagttccgggccgacgcgataggcgcggatcaccggtaaataaaccttacggttggcatcagtgtccaggccacgttcgcgggcgatttgctgggcgctggtctgtaagtcctgatgctgcaatttcggcaagtaacgcgcaccaacaatcaaactcaccagaccgattaaataggttaaggcatacccgaggctcagattatccagtgccagactgagctgcctgctttccatgccggaatgacgcagtgtatcgccagcaccgaccagaaccggtgtgctcgtcatagagcctgctaacataccggccgtcaggccaatatcccagccaaacagcttacctaaccctaaggcgatcaccagcgcactgccaaccatcaccagtgctaacattaggtaatttttcccatcgcgaaaaaaaatggaaaaaaagttcggtccggcttcgaccccgacgcagaaaataaacagcataaagccaagattaagcgcatcggtgttaatgctgaaatgttgttggcctaataacaggcttacgactaaaacgccaatggaattacccagttggatgctaccaagtcgtaactttccgagacatagcccaagcgcgaggaccacaaataataacagaatgtaattcccatttaacaattcggcgacgtttatattcacggaggctaacttcttgtttactagtaagctgttgaaagaaatggtaatttacgataatgttttttaccagaattcagggcgcagattcattcagcgcacctaaacgatagtaaagtaacaatatattttactagtgtaatcacattaggtatcaacggctatatgaattgcgttggcctatattagcatggaatgcgaagcggctttatcttactgaacgccacactggcgaaaaatgtgttcgatagacgcagtgtcaggaggaacgagtgaaacataaacaacgttgggcgggggcaatctgctgttttgtcctcttcattgtggtgtgcctttttctggcgacgcacatgaaaggcgcttttcgggctgccgggcatcctgaaatcggcttgctatttttcattcttcctggagcagtcgccagcttctttagtcagcgtagagaagtcctgaaacctctgtttggcgcaatgctggcggcaccctgtagcatgctcattatgcggctgttttttagtccgacgcgcagtttctggcaagagctggcatggttactaagcgcggtgttctggtgtgcgctgggggcactgtgtttcttatttatcagtagtttgtttaaaccacagcacagaaaaaatcagtaaagccctcaacgcgagggcttgtcagacgatcaggcgtccagattttctttcacccatgcagcaaaatcggtatagccgccgatatgttgctgatcgacaaaaatctgcggcacggtttctacgggtttacctgccttttgttgtagatcttctttagtgatcccttccgcacgaatatctacatactgatactgaaaatcatcgcgttcattgctcaatttctcagccagatcttttgcacgcacacagtaagggcaaccgctacgaccaaaaataacggtttgcattatttctctcctcatagatttatgcctgtaatgatcacgctaaaatgtattcgctgaaagtaggtttaacctgttgcattaattgctaaaagctataactgttaaacacaatacagtgaaaagttttagactgaaggctcactttgcagagggaagcgtatgcgcgcgatcggtaaattgcctaaaggcgtgttgatactggaatttatcggaatgatgctactggcggtggcgctgctgagcgtaagcgactccctgagcctgcctgagccattttctcggccagaagtgcagattctgatgatttttctcggtgttttgctcatgcttcccgctgcggtggtggttattcttcaggtggcaaaacgtcttgccccacagctgatgaaccgtccaccgcaatatagtcgtagtgaaagagaaaaagataatgacgccaaccattgaacttatttgtggccatcgctccattcgccatttcactgatgaacccatttccgaagcgcagcgtgaggcgattattaacagcgcccgtgcgacgtccagttccagttttttgcagtgcagtagcattattcgcattaccgacaaagcgttacgtgaagaactggtgacgctgaccggcgggcaaaaacacgtagcgcaagcggcggagttctgggtgttctgtgccgactttaaccgccatttacagatctgtccggatgctcagctcggcctggcggaacaactgttgctcggtgtcgttgatacggcaatgatggcgcagaatgcattaatcgcagcggaaagcctgggattgggcggggtatatatcggcggcctgcgcaataatattgaagcggtgacgaaactgcttaaattaccgcagcatgttctgccgctgtttgggctgtgccttggctggcctgcggataatccggatcttaagccgcgtttaccggcctccattttggtgcatgaaaacagctatcaaccgctggataaaggcgcactggcgcagtatgacgagcaactggcggaatattacctcacccgtggcagcaataatcgccgggatacctggagcgatcatatccgccgaacaatcattaaagaaagccgcccatttattctggattatttgcacaaacagggttgggcgacgcgctaaaaccgccacgtcgatgtatgatacgcgggcttttgaccaggtctgacagagaggtgcagggtgaaaattgccatattgtcccgggatggaacgctctatagctgtaagcggctgcgtgaagccgctatacagcgcggtcacctggttgaaattcttgatccgctttcttgctacatgaacataaatcctgcggcgtcttctattcactacaaaggccgcaagttaccccattttgacgcagtgatcccgcgtattggcaccgccattaccttttatgggacggcggcactgcgccagttcgagatgctggggagctatccgctcaatgagagcgtcgccattgcccgggcgcgtgacaaattgcgttccatgcaactgctggcgcgtcagggcatcgacctgcctgtcacgggcattgcgcatagcccggatgataccagcgatttaatcgacatggtcggtggtgcgccgctggtggtcaagttggttgaaggcacgcagggaattggcgtcgtgctggcggagacgcgtcaggcggcggaaagcgtgattgacgctttccgcggtctgaacgcgcatattctggtgcaggaatatatcaaagaggcgcaagggtgcgatatccgctgtctggttgttggcgatgaagtggtcgctgcgattgaacggcgggcgaaagagggcgattttcgttccaatttgcatcgtggcggcgcggcaagcgtcgccagtatcacaccacaggagcgtgaaatcgcgataaaagccgcgcgaacgatggcgctggacgttgctggtgtggatattctgcgtgctaatcgcgggccgttggtgatggaggtgaatgcgagcccggggctggaaggaatagaaaaaaccaccggtatcgacatcgcgggtaaaatgatccgctggatcgaacgccacgctacgacagaatattgcctgaaaacgggtggttaatcgcaatcacattactgatcatggttttgcctgcgctttttgcgtaagctgtgccggtctttttatcgaaagaggttgtacaaaattatgacaagcctggtcgttcctggtctggatacgctgcgtcaatggctcgatgacctggggatgagtttttttgaatgtgataactgtcaggctctgcatctgccccatatgcagaatttcgacggtgtctttgatgccaaaatcgatctgatcgataacacgatcctgttttctgccatggcggaagtccgacctagtgccgtattgccgctggcggcggatttatctgccatcaatgccagtagcctgaccgtgaaagcatttcttgatatgcaggatgataatctgccaaagctggtggtttgccagtctttatccgttatgcagggcgtaacctatgagcagtttgcatggttcgtgcgtcagagcgaagagcagattagcatggtcattcttgaagctaatgcccatcaactgctgttaccgactgatgatgaagggcaaaacaacgttaccgaaaactatttcctccactgataactcctttcgagcacgcagtcgctggtgcagtggctgcgcgctgcaaaattatctgctgtttttaaccttttcttaaagattatttcacttctcttgtgtcgatttggctttatcacatagagcaaatatgcataaaaatttgttaaataccgttttttaatccgagctatagtctcaaaccctggctaaagttattcttgcgatgcttttatatagcgagcagtgctggccgggagaaagttctcttttcttacaccgcgccgataaaaaatatgcacgtttattgcatatctttcagtgtgacaacttttgttcgtttgttaacgaactttcagaaggaaagagatatgaccgccttaaataaaaaatggctaagcggtctggttgcgggtgctctgatggccgtctctgtcggcacgctcgcggctgaacaaaaaacactccacatttataactggtctgattatatcgccccggacacggtggccaattttgaaaaagaaaccggtattaaagtcgtctacgatgttttcgactctaacgaagtactggaaggcaaattaatggccgggagtaccggctttgatctggtggttccatctgccagctttctggagcgccagttgactgcgggagttttccagccgctggacaaaagcaaattgccggagtggaagaatctcgacccggaactgctgaagctggtcgccaaacacgatcccgacaataaatttgctatgccctatatgtgggcgacgaccgggattggctataacgttgataaagttaaagcggtgctgggcgaaaacgcgcccgtcgatagctgggacttgatcctcaaacctgaaaatctggaaaaactgaaaagctgcggtgtctctttcctggatgcgccagaagaagtttttgctaccgtgttgaattatctcggcaaagatcccaacagcactaaagcggatgattacaccggaccggcaacagatctgctgttaaagctgcgcccgaacattcgttatttccatagttctcaatacattaacgacctggcaaacggcgatatttgcgtcgctatcggctgggcaggtgatgtctggcaggcgagtaaccgcgcgaaggaagcgaagaatggcgtgaatgtcagcttcagcattccaaaagaaggggcgatggcgttctttgatgtattcgccatgcctgcggatgccaaaaacaaagacgaagcctatcagttcctgaattacctgctgcgcccggatgtagtagcgcatatttccgaccatgtgttctatgccaacgccaataaagcagccacgccgctggtgagtgcggaagtccgtgagaacccaggtatttatccgcctgcggatgttcgtgcgaagctgttcactctgaaagtgcaggatccgaaaatcgaccgtgtgcgcacccgcgcgtggaccaaagtgaagagcggaaaataatccgcagtcgtagatgccggaggggcgcaccacacccgccggcaattcgcaccattatggtgcgcttgcacacattcaatgccggagagcagccgtgaatgacgctatccctcgcccgcaggcgaaaacccgtaaggcgctgacgccgctattagaaatccgcaacctgaccaaatcctacgatggtcaacatgcggtggatgatgtcagcctgaccatctacaaaggtgaaatcttcgcgctgctgggcgcatccggctgtggcaagtccacgctgctgcgtatgctggcaggtttcgaacaaccttctgccggacagataatgcttgatggcgtcgatttgagtcaggttccgccttacctgcgccccatcaatatgatgtttcagtcttacgcgctgtttccgcatatgaccgtggaacagaacatcgcttttggcctgaaacaggacaaactaccgaaagcggaaattgccagccgggtcaatgagatgctcggcctggtgcatatgcaggagttcgccaaacgcaaaccgcatcagctttccggtggtcagcgacaacgtgtggccctggcccgaagccttgcgaagcgcccgaaactattactgctcgatgagccgatgggcgcgctggataaaaagctgcgtgacaggatgcagcttgaagtggtggatattctggagcgcgtcggtgtgacttgtgtgatggtcacccacgatcaggaagaggcgatgaccatggcggggcgcatcgccattatgaatcgtgggaaatttgtccagattggcgaaccggaagagatctacgagcatccgactacccgctatagcgccgaatttattggcagcgtaaacgtctttgaaggcgtactcaaagagcgtcaggaagatggcctggtgcttgatagcccggggctggtgcatccactgaaagtcgacgcggatgccagcgtggtcgataacgtgccggtacatgtggcgctgcgcccggaaaaaatcatgctttgcgaagagccgcccgccaatggttgtaacttcgcggtgggggaggtgatacacattgcctatctcggcgatcttagcgtgcatcacgttcgtctgaaaagtgggcagatgattagcgcccagctacaaaacgcccatcgtcatcgtaaagggttaccgacctggggcgacgaagtgcgtttgtgctgggaagtggacagctgtgtggtgctgacggtttaaggagcaaagatgagtacacttgaacctgctgcccagagcaaaccgccgggcggatttaagctgtggttgagccagctgcaaatgaagcatgggcgcaaactggtcattgcgttgccatatatctggttgatcttgctgtttctgctgccatttctgattgtctttaaaataagcctggcggagatggcgcgcgctattccaccttataccgaactgatggagtgggctgacgggcaactgtccatcactcttaatctcggtaattttctgcaactgaccgacgatccgctctatttcgatgcttatctccagagcctacaggtggctgcgattagcacattttgctgtttactgatcggctatccgctggcgtgggcggtggcgcacagtaagcctagcacccgtaatattttattactactggtgatcctgccgagctggaccagctttctgatccgcgtttatgcctggatgggaatattaaaaaacaacggtgtgctgaataattttctgctgtggctgggggttatcgatcaaccgctgaccattctgcataccaatctggccgtttatatcggcattgtttacgcttacgtgccgtttatggtactgccgatttataccgcgttgattcgtattgattatagcctggtggaagcagcgctggatctcggtgcacgaccgctgaaaacgttctttactgtgatcgtgccgctgactaaaggtgggattattgccggaagcatgctggtgtttatcccggctgtgggcgagtttgtgatcccggaactgctcggtggcccggacagcatcatgatcgggcgcgtgctatggcaagagtttttcaataaccgcgactggccggtggccagcgcggtagcgatcatcatgttgctgctgctaattgtgccgataatgtggttccacaaacaccagcaaaaaagcgtgggagaacacggatgaataatttaccggtagttcgtagcccctggcggattgtgattttgctgctgggctttacctttctctacgcgccaatgctgatgctggttatctatagctttaacagcagcaagctggtgacggtgtgggccggctggagtacgcgctggtatggtgagttattgcgcgatgacgcgatgatgagtgcggttggtttaagtctgacaattgcggcctgtgcggcgacggcggcggcgatcctcggaactattgcggcggtggtgctggtgcgctttggcaggtttcgcggaagtaatggctttgcctttatgatcaccgcgccgctggtaatgccagatgtcatcacgggcttgagcctgttgttattattcgtcgcgcttgctcatgccattggctggcctgcggaccgcggtatgctcaccatctggctggcgcatgtcactttttgtacggcttatgtggcggtcgttatttctagtagattgcgggaactggatcgcagcatagaagaagcagcgatggatctcggtgcgacgccgctgaaagtgtttttcgtcattacgctaccgatgatcatgcccgcgatcatttctggctggttactggcttttactttgagccttgatgatctggtgatcgccagctttgtttccgggccgggagccaccacgttaccgatgctggtcttttccagcgtgcggatgggggtgaatccggaaatcaacgccctggcaacattgatcctcggcgcggtcggaattgtcggatttatcgcctggtatctgatggctcgcgcagaaaaacagcggatacgcgacatccagcgtgcaagacgtggctgaagacactaaaatttgccaacctggctacataatgccgcgcatgtcgcggcattgttttcatggaagacgaaacgttgggattttttaagaaaacatctagttctcatgctcgcctgaatgtgcctgcgctggtgcaggtggcggcgctcgccattattatgatccgtggcctcgacgtgctgatgattttcaatacgctgggcgtgcgcggtattggcgagttcattcatcgcagcgtacaaacctggagtttaacgctggtctttttaagcagtctggtgctggttttcattgagatctggtgtgcgtttagtctggtgaaagggcgtcgctgggcgcgctggctatatctgctgacacaaatcaccgccgcaagttacttgtgggcggctagcctggggtacggttatccggagctgttcagcattcccggtgaaagtaaacgtgaaatcttccatagcctgatgctgcagaagctgccggatatgctcatcctgatgctgctgttcgttcccagcaccagtcggcggttcttccagttgcaataatgtgtataatcgtcgcccctgatgatgtgaaggtcaatgtatgcagtgcgcactttacgacgcgggtcgctgtcgttcctgtcagtggataatgcagccgattccagagcaactctccgctaaaaccgccgatcttaaaaatctgctcgccgactttccggttgaggaatggtgcgcgccggtgagtggcccggaacaagggtttcgtaataaagccaaaatggtggtgagtggtagcgttgaaaaaccactgctcggtatgctgcatcgcgatggcacaccagaagacctttgtgactgcccgctttatcctgccagttttgcgcccgtttttgcggcgctaaaaccgtttatcgcccgagcggggttaacgccctacaacgtggcgcgtaagcgtggcgaactgaaatacattctgctgactgaaagccagagtgatggaggcatgatgctgcgctttgtactgcgttctgataccaagctggcgcaactgcgtaaggcgctgccgtggttacacgaacaactaccgcagctgaaagttattaccgtcaatattcagccggtacatatggcgattatggaaggggagacggagatctacctgaccgaacaacaggcactggcggagcgttttaatgacgtaccgctgtggatccgtccgcaaagtttcttccagactaatccggcggtcgccagccagttgtacgccaccgcgcgcgactgggtacgacagctgccggttaaacatatgtgggatctgttctgcggtgtggggggctttggtttacactgcgcgacgcctgacatgcagttaaccgggatcgaaattgcaagtgaggccattgcctgtgcaaagcagagtgccgctgaactgggcttaacgcgtttgcaatttcaggcgctggactccactcagtttgccaccgctcagggggatgtgccggagctggtgctggttaacccgccgcgccgcggcattggtaaaccgctgtgtgattatctcagtacgatggcaccgcgttttatcatctactccagctgtaacgcccaaactatggcgaaagatatccgcgaactgcctgggtttcgtattgaacgggtgcagcttttcgatatgttcccgcataccgcgcactatgaagtgctgacgctgctggtgaagcaataaaaaagccgcatgtgcggcttcagattgctgacaaagtgcgcgttgtttatgccggatgcggcgtaaacgccttatccggcctacaaaagcgtgcaaattcaatacattgcatgggccatgtaggcctgataagcgtagcgcatcaggcaattttacctttgtcatcagtctcaagccgcggttgcggctttctgaatcttactgtgggaaccactggtcactgattttttgataagtaccgtcagctttaattgctgccagcgcgttattcagtttttccagcagggctttgttatccggacgtacagcgatgcccaggccggtgccaaaatattgcggatcggtcactttctcagtagcaacaccaagttgtggattggttttcagccattcgtttaccaccgctgtgtcaccaaataccccatcaatacgaccatttttcagatcgataaaggcattctgataactgtcataagagacagttttcacttccgggtgctgatcctgaatatatttctggtgcgtagtaccgttttccatcccaatacgtttgcctttcagatcggcaaacgttttgtaggtatcttttttggcaatcacgacggcactgttttcatagtagggcgtggtaaagcttacctgtttgctacgctccggggtgatatccataccggagattacggcgtcatattttctgaatttcagggacgggatcaggctgtcgaacgcgtgattagtaaaagtacattctgcctgcatttgtttgcacaaggcttttgccagatcgatatcaaagccgacaatctcattattagcacctatagattcaaagggtggataggtggcactaacgccaaaattgattttctctgcggcagaagcaccgaaagtaaaggaagcaagtaaagcggcaagaactaactttttcatgatggaactcccgtctgtcaatcttatgatttttggccgtgtctgcggcatgggataacaatgccatcaagtgaatttatatgcaataaacatgattaaataatttaaatgaaataaaaaagacggacaacttagtgggttgtccgtcttcattataagaatttatgcactatgtaggccggataaggcgtccccgccgcatccggcacaggcaccgtgctgatgtctgatgcgacgctggcgcgtcttatcagacctacaaaaccccccggcgaatgtacgcagccacattaatttcgccgttcgaatgccagcgctttgcgctcgatcagacgcatcatcagcgtcagcaggccgttaacgaccaggtaaataatccctgccgcaccgaacaccattacatcgtaggtgcgtccgtacaacaactggctgtatcccatcacttccatcagcgtaatggtgtatgccagagaggtacttttgaataccagcaccacttcgttggaataagaagagaggctgcgtttaaaggcatacggcagcaggatcgccagcgtatcttttttgctcattcccagggcgctacaggactgccactgaccttccgggatcgcacgaattgcaccgtaaaacagctgcgtggtatacgccgcactattcaggctcaacgcaatcagcgcacataaccacggttcactcaacaaatgccacagtgccggatactcctgcaaagtcggaaactggcccggcccgtaataaatcaggaagatctgcaccagcagcggcgtaccggtaaacagcgtgatataaccccgcaccagccacaccagcaccggcgttttcagcgtcaggatgatggtaaaaatcaatgccagaatcagtgccacaatcaggctggcaacggttagcgtcaggctggtgtgtagccctttcatcagttcgggtaaatactcaaacattagctgggcctccgctcaaaacgtgtcgcgcgcaggtcaatgcgtttgagaatgtactgactgagcagggtgatcaccaggtaaatcgccgccgccacaatgtaccaggtaaatggttcctgggtacgagtagcgatgctttttgtttgcagcattaaatcattcacactaatcaaactgaccagcgcggtatctttcagcagcaccagccactggttaccgaggccaggcagcgcatgacgccacatctgcggcatcaccagacggaaaaagatagcgcttttgctcagccccagcgcctgaccagactcccactgacccaccggcaccgctttcaacgcgccccgaagcgtttggctggcataggcggcatacagcagactcagagcgatgacaccacaaaggaacgggctaacgtcgaagttctcaatgtccatctgcactgggatctgcacgaacccaagattgatagtgaagccatcgctaagcgtcagcagcagctggctggagccaaaatagataaacagcaccaccagaatttctggcaggccacgcagaatggttaccagcgcactacctgcccacgcgacaggacgccattttgcgctctcccataccgcaaagaacatcgccagcgccagcccgacaatcaatgcacaaacggcaaggccgacggtcatcccggcggcgcttgctaaaggaaaaaattcattcatcaggaattacttctggaaccatttgttgtagatggtttcgtaagtgccatctttcttcactttttccagcgcagtgttgagtttctgctgcagctcagtgttgccctgacgtaccgcgatgccgaggccagtgccgaagtaatctttatcggtcactttgtcgcccaccgccgccagtttcgggttatctttcagccactcagtgaccactgcggtgtcaccgaagacgccgtcgatacgcccgttttgcagatccagttttgcgttctggtagctgtcatacggaacggtagtgatttccgggtgcttatccataatgaatttctggtgtgtcgtcccgttctgtacgccgacttttttgcctttcagctgatcaacactggtgtatttgccttgctgacccacaaacagggcagagttgtcatagtacggggtggtaaacagcacctgcttttcacgctccggagtgatatccatgcccgccatcacggcttctacgcgacggaatttcaggcttgggatcaggctgtcaaacgcctggttagagaaagtgcaggttgcatcaatctctttacacagcgcttgtgccaggtcgacgtcaaaaccaacgatctggttgtttgcatcaatgctttcaaacggaggataggaggcttcggtagcaaaacgaatggtttcggcagctgtggcggaaagactaaaacctgcaattaacgcggcaatcagaacttttttcattgttgttatcccgaatcttagtgagagagatagtttttaaatgcttcggtttgcggctcggtaaagcagctcgcgtcgccttgttctacgatatgaccattttccatatacaccactcggctggcggttttacgcgccacttcaacttcgtgggtgacgatcacctgggtaatattcgtttctgccagctcacgaatgatgctgacgatttgtgccgtaatttccgggtccagtgcggcggtcggttcatcgaacagcagtacctgcggttccatcatcaacgcacgggcaatagcaacacgctgctgctgaccaccagaaagatgcagcgggtaacgatcgctataaggtttgagacgcagacgttccagcagtttttctgcacgggccagcgcctgatctttactcaaccccagtacacggcagggcgcttcaatcaggttttgctgcacggtcagatgcggccacaggttgtattgctgaaacaccatgccaacgttacgacgcaaatcgcgaatcgctttgtcagagggtgttttggtgaaatcgaaatggttgcctgcaatgttgagcgtaccggagcgcggcatctcaagcagattgagtacacgcagcaggctgcttttacccgcgccgctggggccaagtaacaccagcgtttcgccctgtgggcaatccagcgtgatatcgaacagcgcctgatgcgcgccgtagaagcaattaatgccgtttaattgaatactcattgacactcgtatactggcagtctgatagctattgaggtcgaagatagtacctttgacagaataattatgcaatatttctgctttaaaagttaaaagcaaagcgcattattcaataaacatagcacaaaataacgggggcggtggtcggcgagcataaatgtcggcattcctcacgaaatgccggacaatttacggggtttattggttgatcaaggcgttagcgattctcgatggactgacggagcgtacccgccgtggcatgaacgctaccgcctaagtaacgcacatcgtcgatgacccaacactggccttcctgaatcattaacacttcatcctgccaaccctggtcaccctgtttgagatccacgcgcaatggaatgttacgggcatcacgattagggatagtgcttgcactggcaacgtgggcgctatctggcaaggtggttcgactggagaatggatcgttggtcagtagttcccgatggttattatcccgggaggcatcgctaagcagtgtcgccagtttgtcgctcagataagggcgcaaggcggtgatgtcgttgctgcggtgcaaaatgcggtagtcataaaattgctgggccacgttatccgggcctccttcaacgcaaggaccactgcgtgtgccgttatctttataagctggagtgactgtggtgcaggcactgaggagcagtgcgcaggggataagcattgtcaatttgctgtagcgcataatgatttccttataagcgatcgctctgaaagcgttctacgataataatgatatcctttcaataatagcgtatcagtctgataatgcttttgagatcgaaggcttagcaaacaaggagatcgatcatgcaattttctacaaccccaactctggaaggccagaccatcgttgaatattgcggtgtggtgaccggcgaagcgattttaggtgccaatattttccgtgatttctttgccggtatccgcgatatcgttggcggacgttccggtgcgtatgaaaaagaactgcgtaaagcacgggagatcgcctttgaggaattaggctcccaggcgcgggcgctgggggccgatgccgtcgtcggtattgatatcgactacgaaacggtcgggcaaaacggcagtatgctgatggttagcgtcagcggtacggcggtgaaaacgcgtcgatgagaagattcttctggctggtcgctgccgctctgttattggcagggtgtgcaggcgaaaaaggcattgtcgagaaagagggatatcagcttgatacccgacgccaggcgcaggcggcgtatccgcgcattaaagtgctggtgatccactacaccgcagatgattttgatagcagcctggcgacactgaccgataagcaggtcagcagccattatctggtccctgcggtaccaccgcgatacaacggtaaaccgcgcatctggcaactggtgccggaacaagaactggcctggcatgcggggattagcgcctggcgcggggcaacgcgccttaacgacacctctattggcattgagctggaaaaccgtggctggcaaaaaagcgccggagtgaaatattttgccccgtttgaaccggcacagattcaggcgcttattccactggcgaaagatattattgcccgttatcacatcaagccggaaaacgtagtggcacatgcggatatcgcaccgcagcgcaaagacgatccggggccattatttccctggcagcaactggcgcagcaggggattggtgcctggccggatgcgcagcgggttaacttttaccttgccgggcgcgcgccgcacacaccggtagataccgcgagtttgctggagcttttggcgcgctacggttatgacgttaaacctgatatgacaccgcgcgagcagcggcgcgtgattatggcattccagatgcatttccgcccgacgttatataacggcgaagcggatgcagaaactcaggcgattgccgaagcattgctggagaaatacgggcaggattaacgcggcagttttccgtggtcgcgtagccaggcggcagttttctcgataccttcatccagggtgatgaccggctgataacctaactcttcctgcgcacgcgtaatatccagcgtaaagtcaaaattcaacttggagacgccgtagtgggtcagcggcggctcttttgcactcttgcggcctaaacgctccatgctgcgggcgatcatatccagcatcgggtaggggacggaacgaatacgacagtcaatattcaactcgtcgatcagcttctgcacgatgctgcgcagtgtgcgatgctcgccgttggtgatgttgtacacacgcccggaaggtagcttatcgcaggcttcctggcttgccagccacattgcgtgcacggcattttcatagtaggtcatatcgaccagcgcactgccgccatgcggtaacagaatactgccgtagtggtgcatcatatgcgccagacggggaataaagactttatcgtgcggtccgaacagactttgtgggcgcagaatagtaaagcgcgtttgtggattcgcctggctaagcatattgatcacttcttcgctggctgctttgctgcgggcaaactcgttggcgaagcggtgagggcgaaaatcttctttaatatcgcgatggtggtgataatcgaagtacagggagggggaagagatatgaataaagttacgcacaccccaggcgacagcccattcacccaggcggcgagtggcgcgaacgttagccagatcgaaagcctgttgtgtcccccagggactggtaaagctggagcagtgccacagcgtatcaatgcccgcgagcatcactttagcttgactactaaccagctcggtcagatccgccggaacaaactctgcgcccattttttccagcaatttgcccattgcctcgttgcgaccggtcgctcgcacgctgatgcctttctggcataaaaactctaccgcgtttcgacctaagccgctggtggcgccggtaaccagtaccttcatatcaatccactgttgttgagaaaataacgtgcgcattcttccgtgatttcccccatgatgcaatgggaaacatgaaagaataacgcaggttttgtcgattaatctgtgctttgttctgccagtctggcgatttgttttgccattccgcgaaaaataaacagatgcgcggggatcatcaataaccagtaaaacagccccggcataccgtgcggatgccagaaagcgcggacatcgatagtacgatagtcgcctttatcttccaggctaaaacacagtcgtcccagccccggcgctttcatgccaaataacaacgtaagttgtttttccggttcaacgacaatcactttccagctatccaccgcatcgccagtctgtaaatattcgcgctccgggcggcctttcgccagcttatgaccgatcgcgcggtccatcaacgcccgtgtctgccacaaaatattgccaaagaaataacgctctttaccgccgatttggttcactacctgccataaagcagcaaggctggcggacgttttaacggtaaaccccgcctgtttggcaaaataaccgtactccggtcgccagcgggcaaaggcctgagcgtcgtagccccagtcgctggagttgaccagtttttcctcctctttcaacgtgctacgtaccgcgtcatcgaaagcgatcagccgttgtgggatgagtgcacgtagcgcggtatcatccgccagcagatcgtgtttcagcccctgaatcaacgccctggcggtggtgggcggtacggaagtaatcacattgagaaaccacacgctaatccagcgggtggggagggggatggggatcaaccagcggcgcttaccgctcaccgccataaaatgttcaaactgttgctgataactgagcacctctggtccggcggcttcgaagatgcggtgttcgctggccggatgatctaacaacgcaaccagatagtgcagcaagttttccagcgcaatgggcgtggtgcgactacgaacccagcgcggaggcgttaagactggcaggttgtagaccatatcgcgcatgacttcgaacgccgcggaacctgcgccaacgataattccggcccgcagttcggtcacgggtacattcgcttcacgcagaatgtccgccgtagcctgacgagcacgcagatgatcgctctgctcatgtggcggggcctgcaagctactaagaaagattaattgcttaactggtacttcacgtagcgcatcgcggacgttgagagccacctggcgctcctgagcgataaaatcgccgccttcgcccatgctgtgcaccagaaaatagaccgtatcgatatcctgcaacagggccggtaggttatccggccagctgagatcgactttatggcaactgacgtttgccagttgcagctttgcaagcctgtcgacatgacgtgccgccgccaggatctgatgcccttgctggctgagtgtgcgcaccagatgctgaccaatgtagccactggcaccgagaactaaaatgcgttgcggcacgtctctctccttaacgcgccaggaatgcacgccagtgggcggcgacttccgccagttgttcgcggctgacgtcaagatgcgtcaccaggcggacaatcgggctggcgttaatcagcacgtttctcgctttcatgtattcgcctaacgcggcagcattttcttccccgacgcgaacaaacagcatattggtgtcctgacgcatcacatccgcgcctgcttcacgcagctgctccgccatccaggcagcgttgtcgtggtcttcctgcaagcgcgcaacgttatttttcagggcatatatcccggcggcagccagaatgccggactggcgcatcccgccacctgtcattttccgccagcgaatggcacgtttaatgtaatcacgattaccgacgagtaaactaccgactggcgtcccaagacctttgctcaggcaaatggtgaagctatcacaatattgcgtgatctctttcagttcgcagccgtaagccaccacggcattaaagatgcgcgcaccgtcaacatgcagcgccagattgcgctcgcgggtaaattcccatgcttctttcaggtattcccgcggcaacactttgccgttgtgggtgttttccagactgagtaatttggtgcgggcgaaatggatatcgtcgggtttgattttcatcgccactttatccagcggtagcgtgccgtcggcagccgcgtctatgggttgcggttgaatactgcccagcaccgccgcgccaccggcttcaaacagatagttatgcgcggcctgaccgacaatatactcttcgccgcgttcgcagtgactgagcagagcgaccaggttggcctgagtgccggtaggcagaaaaatggcggcttctttaccggaaagctctgctgcgtagtcctgcagagcattaacggtagggtcgtctccgtaaacgtcgtccccaaccggggcggccatcatcgcttcgagcatggcgcggcttggtcgggtaacggtatcactgcgtaaatcaatcatggcatgtccttattatgacgggaaatgccaccctttttaccttagccagtttgttttcgccagttcgatcacttcatcaccgcgtccgctgatgattgcgcgcagcatatacaggctgaaacctttggcctgttcgagtttgatctgcggtggaatggctaactcttctttggcgaccaccacatccaccaacaccggaccgtcgatggagaaggcgcgttgcagggcttcatcaacttcagacgctttttctacacggatacccgtaatgccgcacgcttcggcaatgcgggcaaagtttgtgtcgtgtagttcggtgccgtcagtcaaatagccaccagctttcatctccatcgccacaaagcccagcacgctgttgttaaagacgacaattttcactggcagtttcatctgcactacactgaggaaatcgcccatcaacatgctaaaaccgccatcgccgcacatggcgaccacctgacgttctggctctgtcgcctgcgcacccagcgcctgcggcatggcgttagccatgctaccgtggttaaagctacctaacaggcgacgcttgccgttcatttttagataacgtgccgcccacaccgttggcgtaccaacgtcacaggtgaaaatagcgtcatcggcggcaaaatgactaatttgctgcgccagatattgcgggtgaatggctttctcgctcggtttagctaaatcgtccagccctttgcgggcgtcgcggtaatcttccagcgctttatccagaaacttgcgatcggctttttcttccaccaatggaagcaatgcacgcagagtgctcttgatatcgccgaccagtgccatatccaccttgctgtgagcgccgatgctggctgggttgatatcaatctgaatgattttggcatcggtcgggtagaaggcgcggtagggaaattgcgtgccgagtagcactaacgtgtcggcgttcatcatggtatggaaaccactgctgaagccgattaacccggtcattccaacatcatacggattatcgtattcgacatgttctttaccgcgcagggcatgaacaataggcgctttaattttcccggcaaactcaactaactctttatgcgcccccgcgcagccgctgccacacatcagggcgatattgctggaataacgcagcagttgcgccagtttgcgtaactcttcttcttccggcgtcacgactggttgtggcgcatgataccagtgcatggttgccccttctggcgcaggttttaacgccacgtcgcctggtaacacgacaacgctaacgccacggttaagcaccgctttgcgcatggcaatcgccagtacttgtgggatctgctccgggctggaaaccagctcgcaatagtgactacattcgcggaatagctcttgtgggtgggtttcctggaaatagccgctgccaatttcgctggagggaatatgagcggcaatcgccagtaccggaacgtgattgcggtggcaatcgaacaggccgttgattaagtgcaggttgccggggccgcagcttccggcgcagaccgccagttctccgctaagttgtgcttcagcgccagcggcaaaggccgccacttcttcgtggcgggtggacatccactcgatggtgcccatgcgattaagactgtcactaagaccgttcagagagtcgcctgtgactccccagatgcgtttcacccctgcgctttcgagtgttttggcgatataagctgcaaccgtttgtttcatggttctccatctcctgaatgtgataacggtaacaagtttagttcatctgacggagggggaagggatgggagagaaaggaggcactaacggttaaatagcccgatgaaaggaatatcatcgggcataaggcgattatgcgagaaccaaatccccctgcggatggcaggagcaggccagtacgtaaccttcagcgatttcggcgtcggtcagcgtcattgtgctgctcaccgtatattcaccggaaaccacttttgtcttacagcagccgcaaacacccgcacggcaggcagcgacaaccggaacgttattgctttccagcgcctccagtagcgtggtgccaaccggggcgtaaaattctcgtgccggttgcagtttggtgaatttcagaccgctggtcgccgcttctgctactggggtgaagaatttctctttaaagaaacgcgtcacgccgagcgctttcacttcctgctctacccaatccatatacggagccgggccgcaggtcatcacggtacgactagctaagtcaggtacacctgccagcagttcgcgagtgagacgaccagcgataaagccttcggtaacgttattttctgccaccagcgttaccggatagttacgccactcatcggcgaaaataacatcctgcggcgtacgcacgttgtagatcacccgcacatcggcctgtggacggttcttcgcaagccagcgacgcatgctcataatcggcgtgacgccgcagcctgccgccagcaacaggaatttatcttctgctttatcgtcgcaggtaaattcccccatcgcgtcgctaagccagagataatcaccgcgttttacatcgcgcgtcagccactgggagccgacaccgtcatcaatccgccgcacggtcagggtgatatattcactcacgcctggcgtggaggaaatggtgtaagcacgcagcgtttccgcactgtttcgcacgctgaccagtgcatattgcccggcgcgatatgggtagtaatcgtggcaaatcagggaaatcgtccacacatccggcgtttcttgcgtaatgtgatgaacctgcatccgccacgggcattgattcgttggcatcgtcatcgacaaactccttacgcgctcaacagttgcttcatgtcttcttcaacagtggtgatagaacgcaggccgaatttctcgttcagcaccgccagcaggtctggtgtcaggaaaccaggtgcagtcgggccggtgacgatatttttcacgcccagagaaagcagcgtcagcagaatgacgatcgctttctgttcaaaccaggagagcaccaggctcagcggcagatcgttgacaccgcagcccagtttctctgccagagtgacagccagaataatcgcactgtaagcatcgttacattgacctgcatctaccagacgcggcagaccttcgatatcgccaaactcaagtttgttaaagcgatatttaccacaggcgagggtcaggatcaggcagtcatccggcacgctggtggcgaaatcggtgaagtagtggcgctcgccgcgtgcgccgtcacagccaccaagcaggaagatatgacgcagtttttcacggctcaccagatcaatcagcgtatcagcagcgccaagcagcgtctggcgaccaaaacccacggtgataaggtgcggaatttcgctgtacgggaagcctgccatctgttgcgcctgggtgataaccgcagagaaatcatcaccgtccagatgacgcacgccaggccagccaacaatgctgcgggtccagatacgatcgtcataagcgcctacggttgggtcgatgatgcagttgctggtcatcacgatggggccagggaaacgagcgaactccacttgctgattctgccagccgctgccgtagttaccgaccagatgcttgaatttacgcagctccgggtagccatgcgcaggcagcatttcgccgtgggtgtagacattaacgcccgtgccttcggtctgttccagcaggttgtagagatctttgagatcgtgaccggaaatcagaatgcatttacccgccgtcgctttgacgttgacctgggttggcgtcgggtgaccgtatttaccggtttcgcctgcatccagaatgctcatcactttgaagttcatctggccgatttccatactacactcaagaagcgcgttcatatcggcaggccaggtccccagccacgccatgattttatggtactgggcataaatatcgttgtcgtattgaccgagaacatgcgcgtgttccatataggccgccgcacctttcaggccatacaggcacagcagacgcaggccgagaatgttttcgccaatcgccgctttatctttgttaggggtaaattctgctgcctgacgttgcagctcgccgagatcgtcgctcaccagttgcaggtcagccatcgggttatcgacgcgcgcgttggcatctacagccaggcattgcgctttcagcgcctcgcgcagggcaatcgcttcacgagcgtagccgacaatacgcggagaatcgaagttaacgttggtcagggtactgaaaaaggcacgtggcgcgaagctgtcaacatcgtggttgatgatgccgtattcacgcgcttttaccgcccaggcagaaagcccttgcagcgccgcgatgagtaaatcctgaaggtcagaagtttccgccgttttaccacacatcccctgcgcgtaactgcagccgtttcctgccggagtacggatagtttgttcacattgcacacaaaacatgatcacaccttttaaagttatatttaatatacatgtttaaggttaagacgcttaacgcggggataaaagggatttttcatgcaactttaagggagattgatttagcgcaattttggcggcagggatctaccgccagagaggtattacgcagagaaaaaggcgatgaggatcggcactaacaggctaagaataaaaccgtgaacaattgccgccgggaccatatccagcccgccagtacgttgaagaacgggcagggtgaaatccatacttgtggcaccgcataagcccagtgcagtagagcggctgcggcgaatcagcccagggatcaacataatagcaatcagttcacgggccagatcattaaaaaacgccgcgctcccgattaccggaccaaaagattcggtcaataaaataccggaaagagaataccagccgaaaccggaggccattgccagcgcggtattgatggggagatcaagaataaaggcgttaattaaaccaccaattaaactactgacaaccaccaccacggcgacaatcattccccggcgattaaggacaatctgctttaaggtcatgccattattgcgcaactgaataccaacgaggaaaagtagcaaaattaacgtgtattcactggcttcggtcgcgtgttgtaagaaagccagtccacttagaccaatggcaaaaccaatcactactacgccgcacagttttaggctctccagcgccatcgcaatacggctcgggagtttttcttgctgatggtggttgcgccacggcaggcctcgctccagccacatcagggcggcaatattacacagtaaaataacggtaatactgacggcagaataatgcagaatcgccaacaggttactggcgaggttatcgagaaacgccagactgatacccataaaaaagagaataaggtaaaccatccagcttaatagctgattaataacttttaacgcagcttgttggcgaagcggaatgaggtaacccacaatcaggggaaccagaatgattaacagcccagaaaacatgaaaacccagtccttgcaaagatgaagtcgaaatgcgcgatgacacactactgaaagcggaaggacgagtaaagttgcaattaaaaggaaatgttatgcataaggagcagtagagtattcgttttcatttaaagatattcttgcgctttaattacaaactgcaccgatgttggtggcgtcaaaatcgccgaggcgttccctgaaggccggggcagcccacatggatgtgggctgagggcgcgttttacagggatgttacctcgcgcccgacccggtagccgtaagggataagtcgagggcaccgcgcagcggcgattttgttcgccagagcccgggggtgcagggggcggcggcgattggccgccccctgcgcgctccttgcgccagtggcaatatgttgcttagctcatgaaaggagcgcaacaagatgatgaatcaacatataacaacatcttaaaaaaaggcctgacattacgccaggccttctgcgttaattaatcacgcttttccagcagggtccggtaaatcagaccaccgataatgccgccgacaattggcaccacccagaagaaccacagttgttctaatgcccagccgccctggaagatagcaaccgcggtgctgcgcgccgggttaacagaagtgttagtcaccggaatactaattaagtgaatcagggttaaggccagaccaatagcgatcggcgcaaaacctgccggcgcgaatttgtcggttgcgccgtggatcaccaacaggaaacctgcactcaataccagttcaactaccagcgcggaaagcatggaataaccgcctggactatgctcgccataaccgttagaagcaaaaccgctggctgccgcgtcaaaacccgttttaccactggcaattaaatacagcagcgccgctgcaacaataccgccgacaacctgggcaattacgtagccaacgacttcttttgccggaaaacgtccgccagcccataaaccaatagtgaccgccgggttaaaatgaccaccagaaatatgaccaacagcaaaggccatcgtcagaacggtcagaccgaacgccaacgccacgccggcaaaaccaatgcctaattccgggaagcctgcggccagtacagcactaccacagccaccaaaaacaagccagaaagtaccaaaacattcagctgctaattttctgaacatatccaccacaattaaaaattgaccctgtgaaaaatatggtcgttttatagggtcgtcgtaaaaaagtgacgacggaaataatgcgcggctattttaaaaacgaaggcgagtcattcaccagataaataaatccagtaaatttgatttagggcaacagcgggttgccccatatagtcatttgtctgattgacagtgtagtgcacgcaaaagatttaatcctttaggcgtaataaaaaataatttatcatgctaattatttgattttgttgtttttgcagacttatcagcaagagggagtataacgcgattattcgctcatttttcagacatttgccatgcttaaatgtgatgtcatcacgtattagcaaggcctttcccgttatactgccagcgtaaaggataagtcacatatttctggaggggatatgattcttgagcgcgttgaaattgtgggttttcgcggtatcaaccgtttgagcttgatgctggaacaaaacaacgtcctgattggggagaacgcgtggggtaaatccagcttgctggacgccttaactctgctgctaagcccagaaagtgatctctaccattttgagcgcgacgatttctggttcccgccgggagatatcaacgggcgagaacatcatctgcatattattttgaccttccgcgaaagcctgccaggccgacatcgggttcgccgttatcggccgctggaagcgtgctggacgccatgcaccgatggctatcaccgtattttttatcgtctggaaggggagagtgcggaagacggcagcgtgatgacactgcgcagttttctcgataaagacggacatccgattgatgtcgaggatattaacgatcaggcacgccatctggtgcgtttaatgccggtgctgcgcttgcgtgatgcccgttttatgcgccgtattcgtaacggcacggtgccaaatgtccctaatgtggaagtcaccgcgcgccagctcgatttcctcgcccgtgagttatccagtcatccgcaaaatctctctgatgggcagattcgtcagggactttccgcaatggtacagctgcttgagcattatttctctgagcagggggccggacaggcgcgatatcgtttaatgcggcggcgagccagcaatgagcaacgaagctggcgctatctggatatcatcaaccggatgattgaccgacctggtgggcgcagctatcgggttattttgctcggcctatttgctactttgttgcaggcaaaaggcacattgcgactggataaagacgcccgtccattgttgctgatcgaagatccagaaacccgtttacaccccattatgcttagtgttgcctggcatctgttgaatcttctgccattgcagcgcattgccaccaccaacagcggtgagttgcttagcttaacgccggtagagcatgtttgccgactggtacgtgagtccagccgcgttgccgcctggcgtctggggccgagtggcttgagtaccgaagatagccgacgcatatcctttcacattcgttttaaccgtccgagtagcctgtttgcacgctgctggttgctggtggaaggggaaacggaaacctgggttatcaatgaactggcgcgtcagtgcggacatcattttgatgccgaagggatcaaggtcattgagtttgcccagtccgggctaaagccactggttaaatttgcccgccgaatggggattgaatggcatgtactggtcgatggcgatgaagcagggaagaaatatgccgctacggtacgcagcctgttgaataacgatcgggaagccgaacgagaacatttaacggcgttaccggcgctggatatggaacattttatgtatcgccagggattttccgatgtgttccaccgcatggcgcaaatcccggaaaatgtaccgatgaatctacgcaaaattatcagcaaagcgatccatcgctcttccaaacccgatcttgccattgaagtggcaatggaggcaggacgtcgtggtgtggactccgtaccgacgctgctgaaaaaaatgttcagtcgcgtgctgtggctggcgcgcggtcgcgcggattaaccgcgaaacatcgtggccatttgtggctgaatagcgtcgagcatctcatagcgccgacggtattcagcccgttttttactggcgatttcggcaatctcttttcgtgctatctgtgctggaaggcggtaatggcgttcagcatcacatacgccgccaacgctttcccagaaagcgttgtaatcagcgtggatcttgccttctttatcgcgataacgcaggctgcggtaaatatgcgtttcattgctgacggcaataatctgctctacctgcaaacgttgggcaaacagacaggccgcttccatcacgaggcgtttgggaaatagcccgtggcaggctttcgtcgcattctggatttcctgatgtggaatttcccattttgcgccttgcagtccgccaataaacatcgttcttttcccctgatattcacacagggtaaacgtgatctctgccagaggaataccttcgctgttgcggaacaggattgtgctgtcaccttctttatccatactgatcatcatggtcagctcaagcgtgaactgctcgccgtttttgccttccagcttcgccagttgcagcccgggggtattcaaatataagctgaattcttccgcgctcatacattcgcggagtaacgcataatggtaacgtaacgcctccagcaattgcttacggctaagattcgccgcaaggtaagggcgatgcagacgcacaggcagtcgcggctggcgcgttaacaatacattgagattaggccagtgggaaagttcgttcatccactcaacgcttaaacgcggcataatcaagctgcgcagcaaaaatttctggcgaaaactacggcgatgccagaatttacccggccgacactgtccacgtgccagactaagaaaaagactcaggctgctgagagattcagatggcgtaaaggtccgttcagttagctggctcatattcatgaaatcaatggttatacatggcgtgcttttcaccattgcgtatcttaaccaaacatcaatagtgtgattactaacgtaaattttagggttttgttgatatttcgttgaagttaatgacccggattggcatatggagtattcagaaaatttatgaaaaagcggaaaaccgtgaagaagcgttacgttattgcgctggtgatagtcatcgccggactgattacgttatggagaattcttaacgcacccgtgccgacttatcagacgctgattgtgcgccccggtgatttacagcaaagcgtgctggcgaccggaaagctggacgcgctgcgtaaggttgatgtgggcgcgcaggtcagcggtcagttgaaaactctgagcgtggcgattggcgataaagtaaaaaaagaccagcttttaggggttattgatcctgaacaggctgaaaaccagattaaggaggtcgaagcaacgctgatggagctacgtgcgcagcggcagcaggcggaagcggagctgaaactggcgcgggtgacgtattcccgtcagcaacgtctggcacaaacgaaggctgttagtcagcaggatctcgacaccgccgcgacggagatggctgtgaaacaggcgcaaattggcaccattgacgcgcaaatcaagcgcaatcaggcttctctcgatacggctaaaaccaatctcgattacactcgcatcgttgccccgatggccggggaagtcacgcaaatcaccactctgcaaggccagacggtgattgccgcacaacaagcaccgaacattctgacgctggcagatatgagcgccatgctggtaaaagcgcaggtttctgaagcggatgtaatccacctgaagccggggcaaaaagcctggtttacggtgcttggcgatccactgacgcgctacgaggggcaaatcaaggatgtactaccgacgccggaaaaggttaacgacgctattttctattacgcccgttttgaagtccccaaccccaatggtttgctgcggctggatatgactgcgcaagtgcatattcagctcaccgatgtgaaaaatgtgctgacgatccctctgagcgcgttaggcgatccggttggcgataatcgttataaagtcaaattgttgcgtaatggtgaaacacgcgagcgtgaagtgacgattggcgcacgtaacgataccgatgttgagattgtcaaagggcttgaagcgggcgatgaagtggtgattggtgaggccaaaccaggagctgcacaatgacgcctttgctcgaattaaaggatattcgtcgcagctatcctgccggtgatgagcaggttgaggtgctgaagggcatcagcctcgatatttatgcgggtgagatggtcgcgattgttggcgctagcggttccggtaaaagcaccctgatgaatattctcggctgtctggataaggccaccagcggcacctatcgcgtcgccggtcaggatgttgccacgctggacgccgatgcgctggcgcaactgcgccgcgagcatttcggctttattttccagcgttaccatttgcttagccatttaaccgccgagcagaacgttgaagtacccgccgtctatgctggtcttgagcggaaacagcgactgcttcgtgcccaggagttgctgcaacggctggggctggaagaccgtacagagtattatccggcacagcttagcggtggtcagcaacagcgcgtcagcatcgcgcgggcattgatgaacggtggtcaggtaattcttgccgatgaaccaaccggcgcactggacagccattctggcgaagaggtgatggcgatcctgcatcagctgcgcgatcgtgggcatacggtgattatcgtcacccacgatccgcaggtcgctgctcaggccgagcgggtgatcgaaattcgcgacggcgaaattgtgcgcaatcctcccgccattgaaaaagtgaatgttactggcgggacggaacctgttgtcaacacggtgtctggctggcggcagtttgtcagcggttttaacgaggcgctgacgatggcatggcgggcgctggcagcgaataaaatgcgtactttactgaccatgctggggattattatcggtattgcgagcgtggtttccattgtcgtggtgggtgacgccgccaaacaaatggtgctggcggatattcgttctattggtacgaatactattgatgtctatcccgggaaagattttggcgatgacgatccgcaatatcagcaggcgctgaagtacgacgacttaatcgccatccaaaaacaaccgtgggtcgccagtgccacacctgccgtcagccaaaacctgcgcctgcgttataacaatgttgatgttgctgccagtgccaatggcgtgagcggcgattattttaatgtctatggcatgaccttcagtgaaggaaacacctttaatcaggagcagctgaacggtcgtgcgcaggtcgtggttctcgacagtaatactcgccgccagcttttcccccataaagcagatgtggttggcgaggtgattctggtcggcaatatgcccgccagagtcattggtgtggcggaagaaaaacagagcatgtttggtagcagtaaagtgctgcgtgtctggctaccttacagcacgatgtccgggcgagttatgggccagagctggcttaactccattactgtcagggtgaaagaaggatttgacagcgccgaggcggaacagcaactcacgcgtttacttagtctgcgccacggaaagaaggatttctttacctggaacatggacggcgtcttgaaaactgttgaaaagaccacacgtactttacaactgtttctgacgctggtggcggtgattagcctggtggtgggcggtattggtgtaatgaatattatgctggtgagtgtgaccgagcggacgcgggaaattggcattcgcatggctgtaggtgcgcgagcaagcgatgttttgcaacagttcctgatcgaagccgtactggtttgcctggtcggtggcgcgttgggaataacactgagtctgttaattgctttcaccttgcagcttttcttacccggctgggagattggttttagtccgttggcgctgctgctggcgtttctctgcagcacggtcaccgggattttatttggctggttacccgcacgaaatgcggcacgactggatccagtagatgctctggcacgagagtaatttttgagataaaaatgccagccgatcgggctggcattttgcctttaggatgtacacaatgagacagaagagttatgcgactgccgcttctacttcgacgggcacaataacactggcgtgattgccttttggcccctggtggacatcaaactgaacggattgtccagcttttagcgttctgtaaccatccatctgaatggtggaataatgagcgaaaatatcttcgccgccgccttcagggcagatgaaaccaaaccctttggcattgttgaaccacttaacagtacccttttccatgcttcgacatccttcgcaaatcttatacaagtaagatggaataaaccggggtcagagagggggctgttcaaaacctcgccaactctagaaatacaatttagagaattagggcgagccgtcaagcatttgacaggggacaaggggcaggtatgaatcaaaaatttgaagcagttaacgctattgacaggaatgtgacagatgtcgctgatgccaacgatagatgatagttatctatcatgtggagtagattggtcaggcaaataagctcttgtcagcggcagggcgttctgccgataaccgtaaccgaagatgataactgacaatgggtaaaacgaacgactggctggactttgatcaactggcggaagaaaaagttcgcgacgcgctaaaaccgccatctatgtataaagtgatattagtcaatgatgattacactccgatggagtttgttattgacgtgttacaaaaattcttttcttatgatgtagaacgtgcaacgcaattgatgctcgctgttcactaccaggggaaggccatttgcggagtctttaccgccgaggttgcagaaaccaaagtggcgatggtgaacaagtacgcgagggagaatgagcatccattgctgtgtacgctagaaaaagcctgaatgcaggcataaaaattgggggaggtgcctatgctcaatcaagaactggaactcagtttaaatatggctttcgccagagcgcgcgagcaccgtcatgagtttatgaccgtcgagcacttgttactggcgctgctcagtaacccatctgcccgggaggcgctggaagcgtgttctgtggatttggttgcgctccgtcaggaactggaagcctttattgaacaaaccacacccgttctgcctgccagtgaagaggagcgcgacacacagccgacgctgagttttcagcgtgtactgcaacgtgcggtcttccatgtccagtcctccggtcgcaatgaggttaccggtgcaaacgttctggtcgctatctttagcgaacaggagagccaggcggcatatctgttgcgtaaacatgaagtcagccgtctcgatgtggtgaactttatctctcatggcacgcgtaaagacgagccgacacagtcttctgatcctggcagccagccaaacagcgaagaacaagctggtggggaggaacgtatggagaatttcacgacgaacctgaatcagcttgcgcgcgtgggcggaatcgacccactgattggtcgtgagaaggagctggagcgtgctattcaggttctctgccgtcgccgtaaaaacaacccgctgctggtgggggaatctggtgtcggtaaaaccgcgattgcggaaggtcttgcctggcgaattgttcagggcgatgtgccggaagtgatggctgactgtacgatttactctctcgatatcggttctctgttagcgggcacaaaatatcgcggcgactttgaaaaacgttttaaagcgttgctcaagcagctggagcaggacactaacagcatcctgtttattgatgagatccacaccattatcggtgcgggtgcagcgtctggtggtcaggtcgatgcggctaacctaatcaaaccgttgctctccagcggtaaaattcgtgtaattggtagcacaacctatcaggagttcagcaacattttcgagaaagaccgtgctctggcgcgtcgcttccagaaaattgatattactgaaccgagcatcgaagaaactgttcaaatcatcaatggcctgaaaccgaagtatgaagcgcaccacgacgtgcgttataccgcaaaagcggtgcgtgcggcggtagagctggcggtgaaatacattaacgatcgtcatctgccggataaagccattgatgttatcgacgaagcgggcgctcgcgcacgcctgatgccggtaagcaaacgcaagaaaaccgttaatgtggcggatattgagtccgtggtggcccgtattgcacgcattccagagaagagtgtttctcagagtgatcgtgataccctgaaaaacctcggcgatcgcttgaaaatgctggtcttcggtcaggataaagccattgaggcgctgactgaagccattaagatggcgcgtgcaggtttaggtcacgaacataaaccggttggtagcttcctgtttgccggccctaccggggtcgggaaaacagaggtgacggtacagcttagcaaagctttgggcattgagcttctgcgctttgatatgtccgagtatatggaacgccataccgtcagccgtcttattggtgcgcctccgggatacgttggttttgatcagggcggtttgctgactgatgcggtcatcaagcatccacatgcggtgctgctgctggacgaaatcgagaaagcgcacccggacgtgttcaatattctgttgcaggtgatggataacggtacgctgaccgataacaacggacgcaaagcagacttccgtaacgtggtgctggtgatgaccaccaacgccggggtacgggaaactgagcgcaaatccattggtcttatccaccaggataacagcaccgatgcgatggaagagatcaagaagatctttacaccggaattccgtaaccgtctcgacaacattatctggtttgatcatctgagtaccgacgtgatccatcaggtggtggataaattcatcgtcgagttgcaggttcagctggatcagaaaggtgtttctctggaagtgagccaggaagcgcgtaactggctggccgagaaaggttacgaccgggcaatgggcgctcgtccgatggcgcgtgtcatccaggacaacctgaaaaaaccgctcgccaacgaactgctgtttggtagcctggtggacggcggtcaggtcaccgtcgcgctggataaagagaaaaatgagctgacttacggattccagagtgcacaaaagcacaaggcggaagcagcgcattaatctgattgttaggtaggttggtcaagtccgtaatctcgaaagaggttacggactttttgtttatggggtggaggaggttcagaccctttttttaatgatgatggtaagttgttgataattagtgctgcgggaaggtaaggataaaaaagggtgctgcaggagaatgggatggttttgctttattaacaacgggctaaacgtgtagtatttgagttcactgccgtacaggcagcttagaaattcacaggtaacatactccacccgcccaccatgttcactgccgtacagacagataaaatgcgaaaaaaaagctcgcactttcgtacgagctcttctttaaatatggcggtgagggggggattcgaacccccgatacgttgccgtatacacactttccaggcgtgctccttcagccactcggacacctcaccaaattgttttgctaccaaacctcatgggtggcaacggggcgctactatagggagttggagtaaaacggtcaagaagaattttaatgataattattgtttgctcatactgtaaacaagttgtgcagtatatctacatcgagacaagttacggacttatacttccaaagtacttcatacatatcacaaaataaaaaggccggttaaaccgaccttttactcgttctttctcttcgcccatcaggcggtaaaacaatcagcgactacggaagacaatgcggcctttgctcaggtcgtacggggtcagttcaacagtcactttgtcgcccgtcaggatgcggatgtagtttttgcgcattttaccggagatgtgtgcagtaaccacgtgaccgttttctaactctacgcggaacatggtattaggcaacgtttcaagaacggtaccttgcatttcaatattgtcttctttggccatctaatcctctggggtatcactaccgtaatttgaaccggcaagataatgccgaagttctgtaaataagtaaagatttgcgcgctaaatcgcaacaaacaggttcggcacattactccgaaaacacacggctaagccgcaccaaaagcgcaacgtataagggagcggtgagataaacgatgggcgttacctgacgcgaaaaattccttatcggcagcggggtaatgagcgtaaccaactctgcgaccgcaattataacactctggggagaaatgtgccgaaaacattcattcttgtggactaaacaagcatcgtggtacccagaaattattcggcaatcgtccgaggcgcatttgattgagataattaaggtaatcccggcggggaatttcgcaggcaccaaggcttgctgtgtgatcgttaaggacctggcagtcgataagcttaccgccatgaccgataaattcctcacagaataccagaagcgccgttttagacgcattttccatccggctgaacatggactcgccacaaaatagcgttccctgggccacgccgtacataccgccgacaagctcatcttcacgccagacttcaatggagtgggcatggccgagttcgtgaaggcgatggtaggcttcgatcacgccacgcgtgatccaggttccttcttcgcgatcgctggcacagccttcaatgacctgaccaaaagcgtaattcatcgtgacacgataggggctgcgtttatgaaatcgcttcatactacggctgatatgcagactttctggccatagcaccgcgcggggatcggggctccaccagaggatggggtcgcctggagaaaaccacggaaaaataccacgctggtaagccattaacaggcgcgcagggctaagatcgcccccaagtgccagcaggccgttaggctcacgtaatgcgccttccggggaagggaaggctatactatggcgagaaagctgaaccaggcgcatgaccgcaaaactccacgcaagtcggatcgttcaataatagcttacaaaccctgcttgaactggtaataacgcccctgtctggcaagcagttctgcgtgagtaccttgctcaataatttgcccgttgtccatcactattatttgttggaaacgagagagtccgcgaagtcgatgggtgaccattaacaccgttttctcacgcatcatttctgcaagcaattcaaggatctggctttcggttgtggcatctaagccttcggtaggttcatccagcaacaccagtggcgcatcatgtaacagcgcacgggcgatagccagacggcgcagttcaccaccggagagctggcgtccgccttcacctaaccaactgttgagacctgcatcctcgagcagcttttccaggccaacgcgacgcaagatctcgctcagagcctcatcactactgccagggctggcgagtaaaagattatcacgcagcgtggcgctaaacagatgcactcgctgaggaacaacgctgatggtctgtcgtagagccgcttcattcaggctggctatggggctatcgttaagcaaaatctcgccctgttgcgggtcccatgcgcgggtcagctgttgtaacagtgtacttttgccgcatccggttcgcccgagaatcgctatatgttccccggcgtttacctgaagagaaatccctttaagtgcctgttgagattgctccggataagtgaactgaacatcccgtaacgtcaggctaacgcgatcggcaacacgagtttgggtatcaggaaaggtgacctccggtttttgatccgttaagtcagagatacgtacggcagaggcaatgacttgccccagatgctgaaatgcacccgttactggtgccagtgcttcaaacgcggctaacgcgcagaagacaaacagggcaattaacgcgccgggttgagcattgccgccaacgccgccagacgccatccacagcatcaggatcaccgctaacgcgccaatgagcagcattatcgcttggctcaatgcggtcagttcagattgacggcgttgcgcttccagccattgaatttctgtattctctagttgcgtgcgataacgatcgctggcaccaaaaatggtcagctcagcttgcccttgcagccaggccgtcagttgttggcgatactgtccgcgaagatgagtcagattttgcccggtgctttttcccgcacgataaaacagcggtggcatcaggaaaagcgtcagtaacataatgccgcccagcgtaaaggcgagggtgaaatcaaggaaacttaacccgattgtcaccaccataatcaccacaaaagcgcccaccagcgggctgataacgcgcaggtaaagatgatcgagcgtatcaacatccgccaccacgcgattgagcaattcgccctgacgatagcgcgccagtccggcaggggagaggggcagcaatttgctgaaggtgtaaatgcgcagatgctgcaacacgcggaaagtcgcgtcgtgacttaccagacgttcaaaatagcgcccggcagtacgggtgattgctgcgccacgcacgcccgcagcgggtagcatatagttgaagctgtacagtccggcaacccccgcaaccgcactggcgctgaggaaccagccggaaagtgtcaacagaccgatactggcgagcagcgtcacaattgccagcacaataccaagacttaacatccatttatgacgtttatacagtgccagatagggtagcaaagcgcgcatttaaatctcctcctgacgatgggccagtaatgtggcgaatgggccaccagccacacttaattccgcgtaacgtccttgctcaataatccggccatcctgcataacccaaatgacatcccagtcagcaagatcttctaactggtgggtgaccattaacgttgtctggcgcagagaggcggcattcagcgcctccattacgcgctgttcactgtgagcatcaaggctggcagcgggttcatccaacagtaataggctacagggatttagtaacgcacgggccaccgccacgcgctgcgcctgccccacggaaaggcgggcagcctggtcgccaacaggcgtatcaacgccttgtgggaggagcggtagaaactcgctgacccaggcgttatccagcgctgcttgtaattcttgttcgctggcatcaggtcgcgccagtagtacgttatcccgcaatgttgctgccggtaattgtgggttttgcccaacccaggagagatgtttacgccaactttctggacttaaatcgcgtaattctatcccgttgattcgtaggcttccctgataactgagaaaaccagaaagcgcgttcagcagactgcttttaccactaccgctgcgaccaaccaacaccgcacgttggcctgctggcaaagtaaagttcagcggtccggccagcgttttaccttccgggctcgtgataaacagctcctcggcctcaatggtcaccggatcggtgcttgctaattccgcctcaccacgttgcggatgggcgagcggggtttccataaacgttttcagactgtcagctgcgccaacagcctgggctttagcatgataaaacgtaccgagatcgcgtaatggctggaaaaactctggcgcaaggatcagggccagaaaacccgcagccagcgtcacaccggtatcgtagtgaccaaaatccagctcgccgagataggaaaaaccaaagtagaccgccaccagagcaatactcaggctggtaaaaaattcgagaatgccggaggataaaaacgccagccgtagcacttccattgtccgttggcggaaatcttcgctagcagaacgaatactttcaatttcagcttcaccacgaccaaaaatacgcaatgtttccatgccgcgcaggcgatcgaggaaatgcccacttaagcgagcaagagcgagaaagttacgtcggttagcatcggcagcccccattccaaccagcgccataaacaacggaattaacggtgcagtgcccagcagaatgagcgccgcagcccagttagaggggaagattgccaccacaatcagcaacggcacgctcactgccagcgccatttgcggcagatagcgtgcatagtaatcatgcatatcgtcaatttgctcgagtaccagcgtcgcccagctccccgcaggtttaccctgaatccacgctggccctgcttgttgcagacggtcgagaacctgacggcggatggcaaagcggatatgctgcccggcgtgataacccacccgttcgcgtaaccagaccacccatgcgcgcagtacaaaggtcagaaccagtaacgtaaagggaagcagcagggcttcacggggaatattctccataatcatatgttgcagaattcgcgccatgaaccaggcctgggcaatgatcaatatgccgctcacaaagcccagcagacgagaaatattcagccaacgttgggagatgacgctttgctgttttaaccagcgggttaactctttttgacgagatttattcattgcacgcttagcaggtgagttatcagaattatttgcagagcaatgttacaacggggaaaaaataaaggcgacccatagtcgcatggtgtcgccttctttacttttgttactgatttgtaaaattattttgcgtcagctaaaccatcgaggtagcgttccgcatcaagtgctgccatgcagcctgtaccggcgctagtaatggcctggcgataaatgtgatccatcacgtcgcctgcggcaaagacgccaggaatgctggtctgggtggcattaccatgaataccgctctgtactttgatgtagccgttttccagttccagctgcccttcgaaaatcgcagtattcgggctgtgaccgatagcaacaaacagaccggcaacgtcgagactctcgatgttatcgctgttttgcgtatcgcgcagacgaacgccagtgacacccatttgatcgccggtcacttcttccagcgtacggttggtgtgcagaatgatgttgccgttctccactttatccatcaggcgcttaatgaggattttttccgcgcggaaaccgtcacggcggtgaatcagatgcacttcgctagcgatgttagacagatacagcgcctcttcaaccgcggtattgccgccgccgatgaccgcaactttctggttgcgatagaagaaaccgtcgcaggttgcacaagcagaaaccccacggcctttaaaggcttcttcagagggcaggccgagatagcgtgcagaagctccggtggcaataatcagcgcgtcgcaagtgtattcgccgttatcgccattcagacggaacggacggttttgcagatccaccttgttgatatgatcaaaaatgatctcagtttcaaacttggtggcatgttcgtgcatgcgctccattaataacggaccggtcagatcgtttggatcgccaggccagttttccacttccgtggtggtggtcagttggccgcctttttccatgccggtaatcagcacaggttgcaggttggcgcgcgccgcgtagacagcagcggtgtatcccgccgggccactacccaggataagcagtttactgtgtttggtcgtgcccatgagatccccatagttgttggcagacaatgggcaggattgtagggaatttacagacgtaaaaaaagagtatgacgattttgttaacaatttgtgcaatcggcagcatcgataagcaggtcaaattctcccgtcattatcacctctgctacttaaatttcccgctttataagccgattaaatgatgaataaacgcccctgttaatgaatatctggcatgttgtactaaaaatcgatgttttgctttgacaatcccctggtgttttgcgaaaacattcgaggaagaaaaaaaacagtattcttatatgcgcataaccatgcatgtaaataccatgtttaccgtgctagtgaaatctacgtatggcgtggacagacgccattcgtgatgtcgatagctgccacaaggcaacggtcttctcaccgtagacccaggcattgcgcgccgtgaatcttcatgatttcggtctatcgtgacgggtagcgactctgaacagtgatgtttcagggtcagacaggagtagggaaggaatacagagagacaataataatggtagatagcaagaagcgccctggcaaagatctcgaccgtatcgatcgtaacattcttaatgagttgcaaaaggatgggcgtatttctaacgtcgagctttctaaacgtgtgggactttccccaacgccgtgccttgagcgtgtgcgtcggctggaaagacaagggtttattcagggctatacggcgctgcttaacccccattatctggatgcaagtcttctggtattcgttgagattactctgaatcgtggcgcaccggatgtgtttgaacaattcaataccgctgtacaaaaacttgaagaaattcaggagtgtcatttagtatccggtgatttcgactacctgttgaaaacacgcgtgccggatatgagtgcctaccgtaagttgctgggggaaaccctgctgcgtctgcctggcgtcaatgacacacggacatacgttgttatggaagaagtcaagcagagtaatcgtctggttattaagacgcgctaacacggaacaggtgcaaaatcggcgtattttgattacactcctgttaatccatacagcaacagtactggggtaacctggtactgttgtccgttttagcatcgggcaggaaaagcctgtaacctggagagcctttcttgagccaggaatacattgaagacaaagaagtcacattgacaaagttaagtagcggccgccgccttctggaggcgttgctgatccttattgtcctgtttgccgtctggttgatggctgccttactaagctttaaccctagcgaccccagctggagccaaacggcctggcatgaacctatccataatttaggtgggatgcccggtgcgtggttggcagatacgctgttctttatttttggcgtgatggcttacaccattcccgtcattattgtcggcggttgttggtttgcctggcgtcatcagtccagcgacgaatacattgattattttgccgttagcctacgcatcattggcgttttggcgctcatccttacctcctgtggtctggcggcaatcaacgctgacgatatctggtattttgcctccggtggcgtcattggcagcttactaagcactacgctacaaccactgctacacagtagcgggggaactattgcgctgctctgcgtttgggcagcgggcctgacgttgttcaccggttggagttgggtgaccattgctgaaaaactcggcggctggattttaaacattctcaccttcgccagtaatcgtacccgtcgcgatgatacctgggtcgatgaagatgagtatgaagacgacgaagagtatgaagatgaaaatcacggcaaacagcatgaaagtcgccgtgcccgtattcttcgcggcgcgctagcgcgtcgtaaacggttggcggaaaaattcattaatccgatggggcggcaaacagacgctgcgttgttctccggtaagcggatggatgatgacgaagagattacctacactgcacgcggtgtggctgccgacccggacgacgtcctatttagcggcaatcgtgcaacgcagccagaatatgacgaatacgatccattattaaacggtgcgccaattaccgaacctgtcgctgtagcagctgctgctaccacggcgacacaaagctgggctgcgccggttgaacctgtgactcagacgccgcctgttgcctctgttgatgttccacctgcgcaacctacagtagcctggcagcctgtaccgggtccacaaacgggagagccggttattgctcctgcaccggaaggttacccacagcagagtcaatatgcgcagcctgcagtgcaatataatgagccgctgcaacaaccagtacagccgcagcagccgtattatgcacctgcagctgaacaacctgcgcaacagccgtattatgcccctgcgccagaacaaccggtggcaggtaacgcctggcaagccgaagagcagcaatccacttttgctccacagtctacataccagactgagcaaacttatcagcagccagccgctcaggagccgttgtaccaacagccgcaacccgttgaacagcagcctgttgtggagcctgaacccgttgtagaagagacaaaacccgcgcgtccgccgctttactactttgaagaagttgaagagaagcgagcccgtgaacgtgaacaacttgcggcctggtatcaaccgattccagaaccggttaaagaaccagaaccgatcaaatctagcctgaaagcaccttctgttgcagcagtacctccagtagaagccgctgccgctgtttccccgctggcatctggcgtgaaaaaagcgacactggcgacgggggctgccgcaaccgttgccgcgccagtcttcagtctggcaaatagcggtggaccgcgtcctcaggtcaaagaggggattggtccgcagttgccacgaccgaaacgtatccgcgtgccaactcgtcgtgaactggcgtcttacggtattaagctgcccagtcagcgtgcggcggaagaaaaagcccgtgaagcccagcgcaatcagtacgattctggcgatcagtacaacgatgatgaaatcgatgcgatgcagcaggatgaactggcacgtcagttcgcccagacacagcagcaacgctatggcgaacagtatcaacatgatgtgcccgtaaacgcagaagatgcagatgctgcggcagaggctgaactggctcgtcagtttgcgcaaactcaacaacaacgttattccggcgaacaaccggctggggcgaatccgttcagcctggatgattttgaatttagcccaatgaaagcgttgctggatgatggtccacacgaaccgttgtttacgccaattgttgaacctgtacagcagccgcaacaaccggttgcaccgcagcagcaatatcagcagccgcaacaaccagttccgccgcagccgcagtatcagcagccacaacagccggttgcgccgcagccacaatatcagcagccgcaacaaccggttgcgccacagcagcaatatcagcagccgcaacaaccggttgcgccgcagcagcagtatcagcagccacaacagccagttgcgccacaaccgcaggataccctgcttcatccgctgttgatgcgtaatggcgacagccgtccgttgcataaaccgacgacgccgctgccttctctggatttgctgacaccgccgccgagcgaagtggagccggtagatacctttgcgcttgaacaaatggctcgcctggtggaagcgcgtctggctgatttccgtattaaagccgatgtcgtcaattactctccggggccggttatcactcgctttgaattgaacctggcaccgggcgtaaaagcggcgcgcatttctaacttgagtcgggaccttgcccgtagtcttagcacggtggcggtgcgtgtcgttgaagttattcctggcaaaccctatgtaggtctggagttaccgaataaaaaacgacaaaccgtttatctgcgcgaagttttggataacgccaaattccgcgataatccgagcccattaaccgtggtgctgggtaaagatatcgccggtgagccggtggttgccgatctggcgaaaatgccgcacttgttggttgcggggactaccggttccggtaaatctgtcggtgtgaacgcgatgatcctgagcatgctttataaagcacagccagaagatgtgcgtttcatcatgatcgacccgaaaatgctggagcttagcgtttatgaaggcattccgcatctgttaacggaagtcgttactgatatgaaagatgccgccaacgcgctgcgctggtgtgttaacgagatggagcgtcggtataaactgatgtctgcgctgggtgtgcgtaatctggcgggttataacgaaaaaattgctgaagccgatcgcatgatgcgtccgattccagacccgtactggaagccgggtgacagtatggatgcccagcatccggtgctgaaaaaagaaccatacattgtggtgttggttgacgaatttgccgacctgatgatgacggtaggtaaaaaagtggaagagctgatagcacgtctggcgcaaaaagcccgtgccgcgggtatccacctcgtactggcaactcagcgtccaagcgttgatgttattactggtctgattaaagcgaatattccgacccgtatcgcctttaccgtatccagtaagattgacagtcgtaccattcttgatcaggctggcgcggaaagtctgctgggtatgggggatatgctctactctgggccgaactccacgttgccggtacgtgtccatggtgcttttgttcgcgatcaggaagttcatgccgtggtgcaggactggaaagcgcgtggtcgcccacagtatgttgatggcatcacctccgacagcgaaagcgaaggtggtgcgggtggtttcgatggcgctgaagaactggatccgttgttcgatcaggcggtgcagtttgtcactgaaaaacgcaaagcgagtatttctggcgtacagcgtcagttccgcattggttataaccgtgcagcgcgtattatcgaacagatggaagcgcaggggattgtcagcgaacaggggcacaacggtaatcgtgaagtgctggccccaccgccgtttgactaactaatgcatcgtatgccggataaggcgcggtagcgtcgcatccggcactctatcaactgaaaattcagtattttcttctttcctcaagctgattattagcctggaatagagagtagagggaactcccgatcgggagtgacgtaatttgaggaataatgatgaaaaaaattgccatcacctgtgcattactcagtagcttagtagcaagcagcgtttgggctgatgccgcaagcgatctgaaaagccgcctggataaagtcagcagcttccacgccagcttcacacaaaaagtgactgacggtagcggcgcggcggtgcaggaaggtcagggcgatctgtgggtgaaacgtccaaacttattcaactggcatatgacacaacctgatgaaagcattctggtttctgacggtaaaacactgtggttctataacccgttcgttgagcaagctacggcaacctggctgaaagatgccaccggtaatacgccgtttatgctgattgcccgcaaccagtccagcgactggcagcagtacaatatcaaacagaatggcgatgactttgtcctgacgccgaaagccagcaatggcaatctgaagcagttcaccattaacgtgggacgtgatggcacaatccatcagtttagcgcggtggagcaggacgatcagcgcagcagttatcaactgaaatcccagcaaaatggggctgtggatgcagcgaaatttaccttcaccccgccgcaaggcgtcacggtagatgatcaacgtaagtaaaggcacctgagtgagcaatctgagcctcgattttagcgataatacttttcaacctctggccgcgcgtatgcggccagaaaatttagcacagtatatcggccagcaacatttgctggctgcggggaagccgttgccgcgcgctatcgaagccgggcatttacattctatgatcctctgggggccgccgggtaccggcaaaacaactctcgctgaagtgattgcccgctatgcgaacgctgatgtggaacgtatttctgccgtcacctctggcgtgaaagagattcgcgaggcgatcgagcgcgcccggcaaaaccgcaatgcaggtcgccgcactattctttttgttgacgaagttcaccgtttcaacaaaagccagcaggatgcatttctgccacatattgaagacggcaccatcacttttattggcgcaaccactgaaaacccgagctttgagcttaatagcgcactgctttcccgtgcccgtgtctatctgttgaaatccctgagtacagaggatattgagcaagtactaactcaggcgatggaagacaaaacccgtggctatggtggtcaggatattgttctgccagatgaaacacgacgcgccattgctgaactggtgaatggcgacgcgcgccgggcgttaaatacgctggaaatgatggcggatatggccgaagtcgatgatagcggtaagcgggtcctgaagcctgaattactgaccgaaatcgccggtgaacgtagcgcccgctttgataacaaaggcgatcgcttttacgatctgatttccgcactgcataagagcgtacgtggtagcgcacccgatgcggcgctgtactggtatgcgcgaattattaccgctggtggcgatccgttatatgtcgcgcgtcgctgtctggcgattgcgtctgaagacgtcggtaatgccgatccacgggcgatgcaggtggcaattgcggcctgggattgctttactcgcgttggcccggcggaaggtgaacgcgccattgctcaggcgattgtttacctggcctgcgcgccaaaaagcaacgctgtctacactgcgtttaaagccgcgctggccgatgctcgcgaacgcccggattatgacgtgccggttcatttgcgtaatgcgccgacgaaattaatgaaggaaatgggctacgggcaggaatatcgttacgctcatgatgaagcaaacgcttatgctgccggtgaggtttacttcccgccggaaatagcacaaacacgctattatttcccgacaaacaggggccttgaaggcaagattggcgaaaagctcgcctggctggctgaacaggatcaaaatagccccataaaacgctaccgttaatgttatcgttgcggtaatgttgttactgtatccctgtggtcgcaggctgtggccacatctcccatttaattcgataagcacaggataagcatgctcgatcccaatctgctgcgtaatgagccagacgcagtcgctgaaaaactggcacgccggggctttaagctggatgtagataagctgggcgctcttgaagagcgtcgtaaagtattgcaggtcaaaacggaaaacctgcaagcggagcgtaactcccgaagcaaatccattggccaggcgaaagcgcgcggggaagatatcgagcctttacgtctggaagtgaacaaactgggcgaagagctggatgcagcaaaagccgagctggatgctttacaggctgaaattcgcgatatcgcgctgaccatccctaacctgcctgcagatgaagtgccggtaggtaaagacgaaaatgacaacgttgaagtcagccgctggggtaccccgcgtgagtttgactttgaagttcgtgaccacgtgacgctgggtgaaatgcactctggcctcgactttgcagctgcagttaagctgactggttcccgctttgtggtaatgaaagggcagattgctcgcatgcaccgcgcactgagccagtttatgctggatctgcataccgaacagcatggctacagtgagaactatgttccgtacctggttaaccaggacacgctgtacggtacgggtcaactgccgaaatttgctggcgatctgttccatactcgtccgctggaagaagaagcagacaccagtaactatgcgctgatcccaacggcagaagttccgctgactaacctggtgcgcggtgaaatcatcgatgaagatgatctgccaattaagatgaccgcccacaccccatgcttccgttctgaagccggtagttatggtcgtgacacccgtggtctgatccgtatgcaccagttcgacaaagttgaaatggtgcagatcgtgcgcccagaagacagtatggcggcgctggaagagatgactggtcatgcagaaaaagtcctgcagttgctgggcctgccgtaccgtaaaatcatcctttgcactggcgacatgggctttggcgcttgcaaaacttacgacctggaagtatggatcccggcacagaacacctaccgtgagatctcttcctgctccaacgtttgggatttccaggcacgtcgtatgcaggcacgttgccgcagcaagagcgacaagaaaacccgtctggttcataccctgaacggttctggtctggctgttggtcgtacgctggttgcagtaatggaaaactatcagcaggctgatggtcgtattgaagtaccagaagttctgcgtccgtatatgaacggactggaatatattggctaatacccaatttttctgaatctaaaaagcgcctgcgggcgctttttttgtctccctttgataccgaacaataattactcctcacttacacgtaatactactttcgagtgaaaatctacctatctctttgattttcaaattattcgatgtatacaagcctatatagcgaactgctatagaaataattacacaatacggtttgttactggaatcaatcgtgagcaagcttgagtgagccattatgaaaacgaaaatccctgatgcggtattggctgctgaggtgagtcgccgtggtttggtaaaaacgacagcgatcggcggcctggcaatggccagcagcgcattaacattaccttttagtcggattgcgcacgctgtcgatagcgccattccaacaaaaagtgacgaaaaggttatctggagcgcctgtacagttaactgtggtagtcgctgcccgctacgtatgcacgtcgtggacggtgaaatcaaatatgtcgaaacggacaataccggcgatgacaattacgacggcctgcaccaggttcgcgcctgcctgcgtgggcgttccatgcgtcgccgtgtctacaatccggaccgcctgaaatatccgatgaaacgagtcggggcgcgcggtgaaggcaaattcgagcgcattagctgggaagaagcctacgacatcatcgcgaccaatatgcagcgcctgatcaaagagtacggcaacgagtctatctatctgaactatggcaccggtacgctgggcggcaccatgacccgctcctggccgccgggaaataccctggtcgcgcggctgatgaactgctgcggcggctatctgaaccattacggcgactactcctccgcgcaaattgcggaaggtttgaactatacctacggcggctgggcagatggcaacagcccgagcgatatcgaaaacagtaagctggtagtgctgtttggtaataaccctggcgaaacgcgaatgagtggcggtggggtgacttactatcttgaacaggcacgccagaaatctaatgcccgcatgatcatcatcgatccgcgctataccgacaccggtgccgggcgcgaagatgagtggatccctattcgtccgggaacagatgccgcactggttaacggtctggcgtacgtcatgatcactgaaaacctggtggatcaggcattcctcgataaatattgcgttggctacgatgagaaaaccctgccagccagtgcgccgaaaaatggccactataaagcttatattctgggtgaagggccagatggcgtggctaaaacgccggaatgggccagccaaatcactggtgttccggcagacaaaatcatcaaattggctcgtgaaatcggtagtaccaaaccggcgtttatcagccagggatggggcccgcagcgtcacgctaacggtgaaatcgcaacccgtgctatcagcatgctggcgattctgaccggtaacgttggtattaacggaggcaacagcggcgcgcgtgaaggtagttacagcttaccgtttgtccgtatgccgaccttggaaaacccgatccagaccagcattagcatgtttatgtggaccgatgccattgaacgtggcccggaaatgacggcgctgcgtgatggtgtacgcgggaaagataagctggatgtgccgatcaaaatgatctggaactatgccggtaactgcctgattaaccagcattctgaaatcaaccgtacccatgaaatccttcaggatgataagaagtgcgagctgattgtggttatcgactgccacatgaccagtagcgcgaaatatgctgacatcctgctgcctgactgcaccgcttccgaacagatggactttgcgctggatgcatcctgcgggaatatgtcttacgtgattttcaacgatcaggtgattaaaccgcgctttgaatgtaagaccatctatgaaatgaccagcgaactggcaaaacgtcttggcgttgagcaacagtttactgaaggccgtacccaggaagagtggatgcggcatctgtatgcccagagccgggaagcgattcctgaactgccaacgtttgaagagttccgcaagcaggggatctttaaaaagcgcgacccacaagggcatcacgttgcttataaagccttccgtgaagatccgcaggcaaacccactgactacgccaagcggcaaaattgagatttatagccaggcgctggctgacattgccgctacctgggaattgcctgaaggcgatgtgatcgatccactgccgatctacacgccgggctttgaaagttatcaggatccgctgaacaaacagtatccgctgcagcttacaggtttccactataaatctcgcgttcacagtacttacggcaacgttgatgtgctgaaagcggcttgccgtcaggaaatgtggatcaacccgcttgatgcccaaaaacgcggtatccacaacggcgataaagtcaggatctttaacgatcgtggtgaggttcatattgaggcgaaagtgacgccacgaatgatgccgggtgtggtcgcactgggtgaaggtgcctggtatgacccggatgcaaaacgtgtcgataagggtggttgtattaacgtactgaccactcaacgtccgtctcctctcgctaaggggaatccgagtcatacaaaccttgttcaggttgaaaaggtgtaaggagtaaccgatgacaacccagtatggattttttattgattccagccgttgcaccggttgcaaaacctgcgagctggcctgtaaagactacaaagatttgacgccagaagtcagcttccgccgcatttatgaatatgctggcggcgactggcaggaagataacggtgtctggcaccagaacgtgtttgcctactatctgagcattagttgtaaccactgcgaagatccggcttgtactaaagtctgcccgagcggtgcgatgcataaacgtgaagatggttttgttgtggtcgatgaagatgtgtgcattggctgccgctactgccatatggcttgcccgtatggcgcaccgcaatataacgaaacgaaaggccatatgaccaaatgcgatggttgttatgaccgtgttgcggagggtaaaaagccgatctgtgttgaatcttgtccgctgcgggcgctggatttcggccctatcgacgagctgcgtaaaaaacatggcgatctggcggccgttgcgccgttgccgcgagctcactttaccaaaccgaatattgtgatcaaacccaatgccaatagccgcccgaccggggataccactggctatctggcaaacccgaaggaggtgtgagatgggaagtggatggcatgaatggccgctgatgatcttcacggtcttcgggcaatgtgtagcaggtggttttatcgttctggctttggcgctgctcaaaggcgacctgcgagcagaagcccagcagcgtgttatcgcctgcatgtttggtttatgggtgctgatgggcattggctttatcgcctctatgctccatcttggtagtccaatgcgcgcttttaacagcctcaaccgggtaggggctagtgcactcagtaacgaaatcgccagcggtagcatcttttttgccgtaggcggcatcggctggttgctggcaatgctgaaaaagctgagtccggcattgcgtacgctgtggctgatagtgacgatggttcttggcgtcatctttgtctggatgatggtgcgtgtgtataacagcattgataccgttccgacctggtacagcatctggacgccgatgggcttcttcctgacgatgtttatgggcggcccgttactgggttacctgttgttgagtctggctggcgtcgatggctgggcgatgcgtctgctgccagcaatttctgtactggcactggtagtgagtggcgtggtgagtgtgatgcagggcgcagagctggcgactattcatagttctgtgcagcaggccgcagcgctggtgccggactatggtgcgctgatgtcctggcggatcgtgcttttggccgttgccctgtgcttgtggattgcaccacagctaaaaggttatcagcctgcggttccgctactttctgtaagtttcattctgcttctggcaggggaattaatcggtcgcggcgtattctatggtttgcatatgaccgtggggatggccgtcgcaagctaatcataacaaccggggtttcggccccggttctcttttatttctgcttcgttaacgtgtcataactggtcatcaaattacgataatcaggaatgtggttagagaacaacgtcgccagtccttcaatatcattacgccagtcgcgatgcagctcgcacgccacgccgaaccatgtcatcaattgcgcaccagcttggctcaagcgatcccatgcgctatgccgggtaatttcattaaaggtcccactcgcgtcagtcacgacaaagacgtcaaacccttcttcaatggcactaagcgccgggaatgccacgcaaacttcggttaccacaccggcaataattaactgttttttacctgtcgctttgacagcttttacaaaatcttcgttatcccaggcgttaatatttcccgggcgagcaatgtaaggtgtatcggggaattgtgctttcagttctggaactaatgggccgttaggaccggtttcaaaactggtggtaagaatagttggtaagttgaaatacttagccaggtcacccagcgccagcacgttatttttaaacttatcgggttcgatatcccgtacaagggaaagtaaaccagcctggtgatcaacaagcaaaacggcagcatcatttttatcaagacgaacatacggtttggtcatcctcttctcctttcgagagtcagtggtacgtctgaaatcgatcagacgcgatgcattgctctgaaagcatagacgggaaatatgagtttgctgtgaccatgaaatttttcgactgaacgaagcgtatgaaatttgtgttagttcaataaaaacaatcagatgagactaatcatctcttcagcattagcgttatgaatgagtaatataaatcgataataccgccgctgggatatcgcgtattttcacccattgacaatgtttttggcggtggcatgatgcgcatgaaatttgaacttcctcacggttttaattcatgtccacgtatacccagcctgtcatgcttttgctgtctggcctgcttttgttgactctggcgattgcggtgttaaatacactcgtgccgctttggctcgcccaggaacacatgtccacatggcaggtaggcgttgtcagcagttcctattttaccggcaaccttgtcggtacattgctgacagggtatgtcattaagcgcattggctttaaccgcagctattatctggcctccttcatttttgccgctggctgtgccggccttggcctgatgattggattctggagctggttggcttggcgttttgtcgcgggcgtcggctgtgccatgatttgggtggttgttgagagcgcgctgatgtgcagtgggacgagtcgtaaccgtgggcgtttgcttgctgcgtatatgatggtttattacgtgggaacgtttttaggccagttactggtcagcaaagttagtaccgagctgatgtccgtattgccgtgggttacaggtttgacgttggcagggatcttaccgctgttgtttacgcgtgtgctgaatcagcaggctgaaaaccatgatagcacgagtattacgagtatgctaaaactccgtcaggcgcggcttggcgtgaatggctgcattatcagtggaatcgttctgggatctctatatggcctgatgccgctgtacctcaatcacaaaggggtgagcaatgccagcattggtttctggatggcggtactggtcagtgcgggtatccttggacaatggccgattggacgtctggcggataagtttggtcgactgctggtgttgcgtgttcaggtctttgtcgtcattctcggcagtatcgcgatgcttagccaggcggcgatggccccagcgttattcatcctcggtgccgctggctttacgctatatccggtggcgatggcatgggcttgcgagaaagttgaacatcatcaactggtggcgatgaaccaggccttactgttgagctatactgtgggaagtctgcttggcccgagttttaccgctatgctaatgcagaatttctccgataatttattgtttatcatgatcgccagcgtaagctttatctatttgctgatgctgctgcgcaacgccggtcatacgccgaaacccgttgctcacgtgtaaatgaattcaagcagagtgtgaacttactgtttcacactctgcttttttgtttcttctatctgacttgctttattccaaattttattcgtttaaaaataaaatgtgcagcaggttataattttgcatttcgctatttccgcacttcttatttgccgcgcataatccctcgttttaccgatgcccctttaattttggcgaaggatttgtctatggctgggaatgttcaggaaaaacagttgcgatggtacaacattgcgctgatgtcttttatcactgtctggggttttggcaacgttgttaataactatgccaaccaggggctggtggttgtttttagttgggtgtttatctttgcactctatttcacaccttatgcgctaattgttggtcagttaggcagcaccttcaaagatgggaagggcggggtcagtacctggattaaacacacgatgggacccggactggcttatctcgccgcgtggacctactgggtggtgcatattccctatctggcacaaaaaccccaggcaattctgattgcgctcggttgggcgatgaaaggcgacggtagcctaatcaaagaatatagtgtcgtagcgttacaggggttaacgctggtgctgtttatcttctttatgtgggttgctagtcgcggtatgaaaagcctgaaaatcgtcggttctgtggcagggattgctatgtttgttatgagtctcctgtatgtggcgatggcggtaaccgcgcctgcaattactgaagtgcatattgcgaccacaaacattacctgggaaacgttcattcctcatatcgactttacctacattaccactattagtatgctggttttcgcggttggcggagcagagaagatttctccttacgttaatcaaacgcgcaacccaggaaaagaatttccaaaagggatgttatgcctggcggtgatggttgcggtttgtgccattctgggcagcctggcgatggggatgatgtttgatagccgtaatatcccggatgacttaatgaccaacggtcagtattacgcctttcagaagctgggcgagtattacaacatgggtaatactttaatggtgatttacgccattgcgaataccctgggacaagtagcggcgctggtattcagcattgatgccccgcttaaagtgctattaggtgatgctgacagcaaatatattccagccagtttatgtcgtaccaacgcttctggtacgcccgttaatggctattttctgaccctggtactggtggcgattctgattatgctgccgactctcggcattggtgatatgaacaatctctataaatggctgttgaaccttaatagcgtagtgatgccgctgcgttatttatgggtatttgttgcatttattgcagtcgttcgcttggcgcagaaatataaaccagaatatgtctttattcgtaataagcctctggcaatgaccgtcgggatttggtgttttgcctttaccgcctttgcctgtttgacggggatcttcccgaaaatggaagccttcactgcagagtggaccttccagttggcgctgaatgttgcaacgccgtttgtgctggtaggattaggactgatattcccgctgctggcgcgtaaagcgaatagtaaataattattgtggtcggtgacgctgactctggcagatctgacccgtttttacataatcgagaaatgcgcgcaagccgcaggacatatactggcggtttggataatagatctggaagcctggacgctctgtgctccagtcttccagtacacattctaaacgaccagtatcaaggtactccttgatctgttcatagagcagatacccgataccagcacccatcaaaacggcctccagttcagcatcaacatcatccagaatgatatttcctgcgacagcaatttccagctcctttgcaaattgccagtggaaaggtttgccgctgggataacgaaaaacaacacattgatgattaagcagatcatgaggatggcggggtttgccatatcttgcaaagtactctggcgttgctgctacacataatttcactggcgggccgatcgccacgctgatcatatctttttcgacgatgcaactaagtcgaacgccagcgtcaaagccctgttggacgatatcgacaagagagtcgtcagttgtgagctcgactttaatatcaggatattcacgtgtgaaaccaaccagtaaagacattaaaaatatacgtgcagctacccgggcggcattgattttgagcgttcctgtcggtgtcagacgaaaatcattcatctcatctaacatgatctgaatttcgtcgaaagctgggcgcaatcgttcatagagattagaacccgcttccgttaagcttacgcttcgggttgtccgattgaataagcgaattttaagacgttgttccagtgttttaatactatggctaatggcggagctggataagcctaactcatcgcccgctgcacgaaagctttgattacgggccacggcaaagaaagtggcaaagtcagacatattcatccgcattagtgaaaatccttcattaactcatcctgaatcatcacgtttacaggattatgccgcctgcgtaaagtgcgctccagaacttaacgtggaggtaaaattatgcagtctgaacgtatttatttggtatgggcccatcctcgtcatgatagtttgaccgcacatattgctgatgcgatccatcagcgggcaatggagcggaaaatacaggtgacggaactcgatttatatcggcgtaatttcaacccagtgatgacgccggaagatgaaccagactggaagaatatggataaacgttattctccagaggttcatcagctttatagtgagctgcttgaacatgacacgttagtggtggtttttcctctctggtggtacagcttcccggcaatgctaaaaggatatattgacagagtatggaataatgggctggcttatggagatgggcacaaattaccattcaataaagttcgttgggtggcgctggttggaggagacaaagaaagttttgtccagatgggctgggaaaaaaatataagcgattatttaaaaaatatgtgcagttatcttggtattgaagatgccgatgtcactttcttgtgtaatacagtggtattcgatggggaagaacttcacgcgagctattatcagagcttattatctcaggtacgggatatggtagatgcactataagatgtgttaaaaacgctgtagcagaatgaagcgcggaataaaaaagcggcaactcaataaagttgccgctttacggggaaattagaacattaccttatgaccgtactgctcaagaatgcctttcacgcgttccatggtctctttcttcggtggtttaacaccgtcgagtttgtactcttcacccattgccacccatttgtgtttgcccagctcgtggtaggggagaagctcgattttctcaacgttgcccatatcacgggtaaattcaccgaggcgatgcgcactatcgtcatcgtcagaccagcctgggacaacaacgtagcggatccacaccttcacatttttgttcgccagatatttagcgaactccagcgtgcggtggttggaaactccaaccagattttggtggatctcgtcgttcatctgtttgagatcgagcattaccaggtcggttacttccagcagttcatcaatcaccggatcgtaacgacgaacaaaaccgttggtgtccagacaggtatgaatgccttcttttttgcaggcgcggaaccagtcacgaacaaactcagcttgcaggattgcttcaccgccggatgcggtaacgccgccgccggaagcgttcataaagtggcgataggtcaccacttccttcatcaaatcttcaacggtaacttctttaccgccatgcgtgtcccaggtgtcgcggttatgacaatacaggcagcgcatcaggcagccctggaaaaaggtgataaagcgaatacctgggccgtctacggttccacaggattcaaaggagtgaatgcgaccaataacactcattgcggtgtttctccagatgtggcccatctgaggccgtgttggtgcgcagctcgaaggctacgtcgagtctgttttggcagtcaccttaaagtatagatagctgacaaaaaaggctctcgcgctaaaaaaggccccactttcgtggagcctttattgtacgctttttactgtacgatttcagtcaaatctaattacatagattgagtgaaggtacgagtaataacgtcctgctgctgttctttagtcaggctgttgaaacgtactgcgtagccagatacacggatggtcagctgcggatatttttccgggttttccatcgcgtcgagcagcatttcacggttcatcacgttaacgttcaggtgctgaccaccttcgatggatgcttcgtggtggaagtaaccatccatcagaccagccaggttggtcttacgaacttcgtcgtctttacccagtgcgttcggaacgatagagaaggtgtaggagataccatctttagcgtaagcaaacggcagtttagcaacggaagtcagagaggctactgcacctttctggtcacgaccgtgcatcgggttagcacccggtccgaacggcgcgccagcacgacgaccgtctggggtgttacccgttttcttaccatacacaacgttagaagtgatggtcagaacagactgagtcgggatagcgtcacggtaggtgtgcagtttctgaattttcttcatgaaacgttctaccaggtcaacagccaggtcatctacacgcggatcattgttaccaaactgcgggtattcgccttcgatttcgaagtcgatagccagaccgtcttcgtcacgaatcggtttaactttcgcatatttgattgcagacagggagtcagcagcaacggacagaccagcgataccacacgccatggtgcggataacgtcacggtcgtgcagcgccatcagagaggcttcgtagctgtacttgtcgtgcatgtagtggatgatgttcagtgcagtgatgtactgtttagccagccagtccatgaagtgatccatgcgctccatcacttcatcatagttcaggacatcgcctttgatcggttcagacttcggaccaacctgcattttcagtttttcgtcaacgccgccgttgattgcgtacagcatggttttcgccaggtttgcacgcgcaccgaagaactgcatttgtttaccaacgatcatcgggcttacgcagcaagcaatagcgtagtcatcgttgttgaagtccggacgcatcaggtcatcgttctcatactgcagagaagaggtgtcgatggacactttagcggcgaatttcttgaagttcagcggcagtttttcagaccacagaatggtcatgttcggttccggagacggacccatggtgtacagggtgttcaggaaacggaagctgtttttggtaaccagggtacgaccgtcgaggcccataccaccgatagattcggttgcccagatcgggtcgccagagaacagttcatcgtattccggagtacgcaggaagcgaaccatacgcagtttcatgaccaggtggtcaaccatttcctgcgcttcttgttcggtgatcttgccagctttcaggtcacgttcgatgtacacatccaggaaggtggaggtacgaccgaaggacattgcagcaccgttctgagacttaacagcagccaggtagccgaagtaagtccactggatagcttcctgagcgttggtagccggaccagagatgtcgtagccgtatttcgcagccatttctttcatctgacccagagcgcggtgctgttcagcgatttcttcgcgcagacggatagtctgttccaggtttacgccgttttccagatcagcctgcagagaagtgaactgtgccagtttgtctttcatcaggtagtcgataccgtacagcgcaacgcgacggtagtcaccgatgatacggccacggccatatgcatctggcagaccggtcagaacaccagatttacggcaacgcaggatgtccggagtgtaaacgtcgaacacgccctggttgtgagttttacggtattcagtgaagatttttttgatcatcggatccagttcgcggttgtacgctttgcaggaaccttcgatcattttgataccaccgaacgggataagagcacgtttcagcggagcttcagtctgcagaccaacgattttctcaagctgcttgttgatgtagccagcgtcgtgagaggtgatggtggaagcaacagcggtgtcaaagtcaactggcgcgtgagtgcggttttccagtttaacgccttccattactttgtcccacagggtggtggtcgcttcagtagcgccagccaggaaggactcgtcaccctcgtacggagtgtagtttttctgaatgaagtcacggacgtttacttcattctgccagtcacctttggtaaaaccttcccaggctgtggctaacttttcattaagctcggacatgtaacacctaccttcttaagtggattttttatttactgcgtacttcgacaaccattaatggtggtcgttttcacgcaggtaaatgacccagtatgtcaacccaaccaacaaaccaccaccgataatgttgccgatcgtaaccggaatcaggttatcagtgatgaaattcatcacggtcaggtgagaaaaattttccggtgcagaaccgactgcggtccaaaattccggggatgcgaagtcgcggattacaatacccatcgggatcataaacatgtttgcgatactgtgctcaaaaccgctggcaacaaacatcgcgaccggcagcaccataatgaacgctttgtccatcaggctgcggccagaataactcatccatactgccagacataccatcaggtttgccaggataccaagacagacggcctcaataaaagtatggtgcactttgtggtcggcggtttgtaggacgtttagtccccattgaccatttgcggtcatatactcgccggaaagccacattaaaagtacaaacagcagtgcgccgaccaggttgccaaaatagacatttagccagtttttcgccaactgaccccaggtgatgcgcccactcgccttagcaacaacaatcaacacggtggaagtaaagagatcggctccgcagacaacacaaagaatcagccccagagagaagcaaatgccgccaaccagttttgccatgccgaagggcattgtgcctgtgccagtggttgctgtgatatagaagacgaatgcgatactgatgaaaacaccggcggtaatcgccagatagaaagtcttaagcggatgtttcgttgctttatagacacccgcctcttcggccactttggccattgcagcaggaagtaaaagatcaaaagggttgtcagctttcacactaactctctctttattaagtcggcgacgagatactaacaaagcattatagatgagaaattgatatagatcatatctcgcctggcttataggcccgtaactcgcatggtttttatgcaaatacggagtaaatatttgattatccaaataaaaataaattttaaaaattaacaaatgagttgaattttttccgcatcctccgctaaaacagttaattaaaagggagcatcaggcgaataaagtaacaatatcgatcgtatttattaaatacaaattaccgatatttaaccttataattacaattattttattaatgcaaatatatgtaaagcggggcattaaaaaaacgccccgtaatataactcagactaatcattaagcctacattgcgtaggctatttgattttattttgcccagaatgctgctttggcgcgctgcagcttttcgtaggccttcaacaagctctgatgtgcagcaaacgcgtgcagatcgctatctaccggttgcaggccgtaaaacgccgcttcgccgctcattgccgcactggcggcttctacggcatctgcgccgtacatgcgaacaaacgcattcagatattgcagcggctggcgatcttcttcctgtgccagtaataacaacgtttgcaggcagcgataatagttggcgcgttccggactaaatacactactgttaaactccatcgtccattcggtccagaccagagcctgttccagatcgccaccagccagcgccagcatggcttttaattcaccgatacgcagggtgtaccaaccgttatcgctcccggtcgccagacccaacagctcacgcacgcgggtaaagtcatcaaaaccttcttcatccagttgctcgatgaggttcaggtaatcttctttttcccactcgctgcctggtaggctaagaatcgtttcacgtaaatggctgcccatactgttattcgcgagccacagatcttcagccggataaatatcggacatgccaggcacgataatacggcaagcataaacgcccagatgctcgtaatcggcaatataaacttctttatcttctttgttgaagatagccatcagtgtggcgaactcttcttccgtggtgccggagaaattccagtccacaaacggataatcggcatcctgcttgaacaggtcccaggagattaaaccgctggaatcgataaagtgcgtttcgaggttggtatgttcagcgacttcttcatcatcgaaggttggcggagtaaacacatccaaatctttcaggccacgaccttgcagcagctcggtcacggtacgttccagtgctacgccaaaatcaggatgcgcaccgaaagaggcaaagcaggtaccgttagcaggattgaacagtaccacgcaaatcaccggatactggccgccaaggctaccgtcataagcgaagattgggaaaccctccgcttccagcgtttcgatggcttcaactactgctgggtaacgcgccagcacgtctgccgggatctctggcaggctgatgctttcagcaataatgcggtttttcacgtagcgttcgaaaacttcagacaatccctgaacgcgtgcttcgttgcgggtattacctgcggacataccgttggagacgtacaggttaccaatgatattcatcggaatataaacggtctgattgtcggactgacgcgtaaacggcaggccgcaaataccacgatcttcgttaccggattgtaggtcaatcagcatgctgccggtcagttcattctccggatcataaaacgcgcgcagacggtcatcgagcagcccttctggcacatcgtcattttcggtcagtgggaaccatttttcgttgggataatgcacgaacggaccgttggcgatggtttcgcccagccagaagtccgcaaaaaagtagttggtactgagacgctcgaaatattcaccgagtgcagaagccagcgccgctttcttggttgcgcctttaccgttggtaaaacacagtgcgcactctttgtcgcgaatatgtacagaccagacgttaggcacgggattcagccaggaggcctcttcaatctgaaagccgaggtcactaagtttttgctggaagcgagcgatggaatcttccagagcggcatctttgccggggataaatgtttgcgtcatgaaaatcactttagtcgtacggaaagcgcgcaataatacgggttttatctcaaaggcgctatcaccgccgccatgccgatgaactgttgactatgcttttagcggataaaccacgttaagagcataaaaatgaaggcgttcgatctccaccgtatggcatttgataaagtgccttttgatttccttggcgaagttgcactacgtagtctttatacctttgtactggtctttttgttcctcaaaatgaccggaagacgcggtgtgcggcagatgagcctgtttgaagttttaatcattctgacgctgggaagtgcggcgggagatgtggcgttttatgatgatgtgccgatggtcccggtacttatcgtctttattactctggcgttgttataccgcctggtaatgtggttgatggcgcacagtgaaaaactggaagatcttctggaaggcaagccagttgtcattattgaagatggcgagctggcctggagcaaactcaataactccaacatgacggaatttgagttctttatggagctacgattgcgtggcgtggagcagctggggcaggtacgtctggcgattctcgaaaccaacgggcaaatcagtgtctatttctttgaagatgacaaggtgaaaccgggtttacttattttacccagtgattgtacgcagcgttacaaagtggtgccggagagcgcggactatgcctgtattcgttgtagtgaaatcattcatatgaaagcgggggaaaaacaattatgtccgcgctgtgcaaatccagaatggacgaaggcaagtcgggcaaaacgggtgacctgacagtaaaaacatcggctttttgctaataatccgagagattcttttgtgtgatgcaagccacatttttgccctcaacggttttactcattgcgatgtgtgtcactgaatgataaaaccgatagccacaggaataatgtattacctgtggtcgcaatcgattgaccgcgggttaatagcaacgcaacgtggtgaggggaaatggctcaaatcttcaattttagttctggtccggcaatgctaccggcagaggtgcttaaacaggctcaacaggaactgcgcgactggaacggtcttggtacgagcgtgatggaagtgagtcaccgtggcaaagagttcattcaggttgcagaggaagccgagaaggattttcgcgatcttcttaatgtcccctccaactacaaggtattattctgccatggcggtggtcgcggtcagtttgctgcggtaccgctgaatattctcggtgataaaaccaccgcagattatgttgatgccggttactgggcggcaagtgccattaaagaagcgaaaaaatactgcacgcctaatgtctttgacgccaaagtgactgttgatggtctgcgcgcggttaagccaatgcgtgaatggcaactctctgataatgctgcttatatgcattattgcccgaatgaaaccatcgatggtatcgccatcgacgaaacgccagacttcggcgcagatgtggtggtcgccgctgacttctctagtaccattctttcccgtccgattgacgtcagccgttatggtgtaatttacgctggcgcgcagaaaaatatcggcccggctggcctgacaatcgtcatcgttcgtgaagatttgctgggcaaagcgaatatcgcgtgtccgagcattctggattattccatcctcaacgataacggctccatgtttaacacgccgccgacatttgcctggtatctatctggtctggtctttaaatggctgaaagcgaacggcggtgtagctgaaatggataaaatcaatcagcaaaaagcagaactgctatatggggtgattgataacagcgatttctaccgcaatgacgtggcgaaagctaaccgtagccggatgaacgtgccgttccagttggcggacagtgcgcttgacaaattgttccttgaagagtcttttgctgctggccttcatgcactgaaaggtcaccgtgtggtcggcggaatgcgcgcttctatttataacgccatgccgctggaaggcgttaaagcgctgacagacttcatggttgagttcgaacgccgtcacggttaatgccgaaattttgcttaatccccacagccagcctgtggggtttttatttctgttgtagagagttgagttcatggaatccctgacgttacaacccatcgctcgtgtcgatggcactattaatctgcccggttccaagagcgtttctaaccgcgctttattgctggcggcattagcacacggcaaaacagtattaaccaatctgctggatagcgatgacgtgcgccatatgctgaatgcattaacagcgttaggggtaagctatacgcttagtgccgatcgtacgcgttgcgaaattatcggtaacggcggtccattacacgcagaaggtgccctggagttgttcctcggtaacgccggaacggcaatgcgtccgctggcggcagctctttgtctgggtagcaatgatattgtgctgaccggtgagccgcgtatgaaagaacgcccgattggtcatctggtggatgcgctgcgcctgggcggggcgaagatcacttacctggaacaagaaaattatccgccgttgcgtttacagggcggctttactggcggcaacgttgacgttgatggctccgtttccagccaattcctcaccgcactgttaatgactgcgcctcttgcgccggaagatacggtgattcgtattaaaggcgatctggtttctaaaccttatatcgacatcacactcaatctgatgaagacgtttggtgttgaaattgaaaatcagcactatcaacaatttgtcgtaaaaggcgggcagtcttatcagtctccgggtacttatttggtcgaaggcgatgcatctagcgcttcttactttctggcagcagcagcaatcaaaggcggcactgtaaaagtgaccggtattggacgtaacagtatgcagggtgatattcgctttgctgatgtgctggaaaaaatgggcgcgaccatttgctggggcgatgattatatttcctgcacgcgtggtgaactgaacgctattgatatggatatgaaccatattcctgatgcggcgatgaccattgccacggcggcgttatttgcaaaaggcaccaccacgctgcgcaatatctataactggcgtgttaaagagaccgatcgcctgtttgcgatggcaacagaactgcgtaaagtcggcgcggaagtggaagaggggcacgattacattcgtatcactcctccggaaaaactgaactttgccgagatcgcgacatacaatgatcaccggatggcgatgtgtttcagcctggtggcgttgagtgatacaccagtgacgattcttgatcccaaatgcacggccaaaacatttccggattatttcgagcagctggcgcggattagccaggcagcctgaatgaacaacgggcaataaatagccaaatctttctttatcaaaacgtcggcacattgtcggcgttttttttcggaccttgtgagtcattttgattaatggtagcgtcgcttgtcaatgtaagttgttgatacataatatttatatatgattaatcaacggatgattcacatgaagaatactaaattactgctggcgattgcgacctctgcagcattactgacagggtgtcaaaatacccacggtattgataccaatatggctatcagctccggtttaaatgcctataaagcagcaacattaagcgatgccgatgcaaaagcgattgccaatcagggctgtgccgaaatggacagcggcaatcaagtcgcaagtaaatccagcaagtacggtaaacgtctggcaaaaatcgccaaagcattgggtaacaatattaatggcacgccggtcaactataaggtttatatgaccagcgacgtcaacgcatgggcgatggcgaacggctgtgttcgtgtctacagtggcctgatggacatgatgaatgacaacgaaattgaaggcgttctgggccatgaactgggccacgtcgcgttgggtcacagcctggctgaaatgaaagcttcttatgcgatcgttgccgcacgcgatgccattagtgctaccagcggtgtggcttcccagctttcccgcagtcaattaggtgatatcgcagaaggcgctatcaatgctaaatactcccgtgataaagagtccgaagcagatgatttctcctttgatctgttgaagaaacgtggcatcagcacccaggggctggttggcagctttgaaacactggctagcctggatggcggtcgcacccagtccatgtttgactctcacccaccaagtacagagcgtgcgcaacacatccgtgatcgtatcgcctctggtaagtaaatcattgtcatctttcgggctggtcttctgccagcccgctataattgcgcaataaatccccatctgaatacagacaaaactggtttttgcacacaacgttaacgatttgtggcgtcggcgcgtataatgcgcgcggttatgttaacggtacgcctgttttaaggagataaagatgacggcaattgccccggttattaccattgatggcccaagcggtgcagggaaaggcaccttgtgtaaggctatggcggaagcgttgcaatggcatctgctggacagcggtgcaatttatcgcgtactggcattggcggcattacatcaccatgttgatgttgcgagcgaagatgcgctggtaccgctggcatcccatctggatgtacgttttgtgagcaccaatggcaatctggaagtgatcctcgaaggggaagatgtcagcggcgaaattcgtactcaggaagtggcgaatgcagctagtcaagtcgcggcattcccacgcgttcgtgaagcattattgcgtcgccaacgcgcgtttcgcgaattaccaggtctgattgccgatggccgcgacatgggaacggtggtattccctgatgcaccagtgaaaattttccttgacgcctccagcgaagaacgtgcgcatcgccgcatgctacagttgcaggagaagggctttagtgttaactttgagcgccttttggccgagatcaaagaacgcgacgaccgcgatcgtaaccgagcggtagcgccactggttccggcagccgatgctttagtgttggattccaccaccttaagcattgagcaagtgattgaaaaagcgctacaatacgcgcgccagaaattggctctcgcataagcgaccgaatttgcagtacccccgttgcaatggaatgacagcgggtatgttaaacaaccccatccggcatggagccaggtggacgttaaatataaacctgaagattaaacatgactgaatcttttgctcaactctttgaagagtccttaaaagaaatcgaaacccgcccgggttctatcgttcgtggcgttgttgttgctatcgacaaagacgtagtactggttgacgctggtctgaaatctgagtccgccatcccggctgagcagttcaaaaacgcccagggcgagctggaaatccaggtaggtgacgaagttgacgttgctctggacgcagtagaagacggcttcggtgaaactctgctgtcccgtgagaaagctaaacgtcacgaagcctggatcacgctggaaaaagcttacgaagatgctgaaactgttaccggtgttatcaacggcaaagttaagggcggcttcactgttgagctgaacggtattcgtgcgttcctgccaggttctctggtagacgttcgtccggtgcgtgacactctgcacctggaaggcaaagagcttgaatttaaagtaatcaagctggatcagaagcgcaacaacgttgttgtttctcgtcgtgccgttatcgaatccgaaaacagcgcagagcgcgatcagctgctggaaaacctgcaggaaggcatggaagttaaaggtatcgttaagaacctcactgactacggtgcattcgttgatctgggcggcgttgacggcctgctgcacatcactgacatggcctggaaacgcgttaagcatccgagcgaaatcgtcaacgtgggcgacgaaatcactgttaaagtgctgaagttcgaccgcgaacgtacccgtgtatccctgggcctgaaacagctgggcgaagatccgtgggtagctatcgctaaacgttatccggaaggtaccaaactgactggtcgcgtgaccaacctgaccgactacggctgcttcgttgaaatcgaagaaggcgttgaaggcctggtacacgtttccgaaatggactggaccaacaaaaacatccacccgtccaaagttgttaacgttggcgatgtagtggaagttatggttctggatatcgacgaagaacgtcgtcgtatctccctgggtctgaaacagtgcaaagctaacccgtggcagcagttcgcggaaacccacaacaagggcgaccgtgttgaaggtaaaatcaagtctatcactgacttcggtatcttcatcggcttggacggcggcatcgacggcctggttcacctgtctgacatctcctggaacgttgcaggcgaagaagcagttcgtgaatacaaaaaaggcgacgaaatcgctgcagttgttctgcaggttgacgcagaacgtgaacgtatctccctgggcgttaaacagctcgcagaagatccgttcaacaactgggttgctctgaacaagaaaggcgctatcgtaaccggtaaagtaactgcagttgacgctaaaggcgcaaccgtagaactggctgacggcgttgaaggttacctgcgtgcttctgaagcatcccgtgaccgcgttgaagacgctaccctggttctgagcgttggcgacgaagttgaagctaaattcaccggcgttgatcgtaaaaaccgcgcaatcagcctgtctgttcgtgcgaaagacgaagctgacgagaaagatgcaatcgcaactgttaacaaacaggaagatgcaaacttctccaacaacgcaatggctgaagctttcaaagcagctaaaggcgagtaattctctgactcttcgggatttttattccgaagtttgttgagtttacttgacagattgcaggtttcgtcctgtaatcaagcactaagggcggctacggccgcccttaatcaatgcagcaacagcagccgcttaatttgcctttaaggaaccggaggaatcatgaccaagagtgaattgatagaaagacttgccacccagcaaagccacattcccgccaagacggttgaagatgcagtaaaagagatgctggagcatatggccagcactcttgcgcagggcgagcgtattgaaatccgcggtttcggcagtttctctttgcactaccgcgcaccacgtaccggacgtaatccgaagactggcgataaagtagaactggaaggaaaatacgttcctcactttaaacttggtaaagaactgcgcgatcgcgccaatatttacggttaagttttttactcaaacttgaacgagagaaaagcacctgtcgggtgcttttttcatttctctaatctggaactggaagctgcctcgcagagttttgaacagttttcaccctttcgttaaattcttctgaatatgcctcggggaacgcaaaattcccaccagacaaccgctcaacaaagttgcacactttccataaacagggaggggtgcatgaaaataacgacagtcggtgtatgcataattagcggaatttttccgttgctgattttgccccaattgcctgggacattaacccttgcgtttctgactctcttcgcctgcgtactggcatttatccctgttaaaaccgtccgttatatcgcgctgacgttgctgtttttcgtttggggcatattaagtgcaaagcaaattttgtgggcaggagaaaccttaactggcgcgacgcaggatgcaattgttgagatcactgcaactgacggcatgaccactcattacggtcaaattactcatctacaaggtcgacgtatattccctgcgagtggtctcgtgatgtatggcgaatatcttccgcaagcggtttgtgctggacaacaatggagtatgaaactcaaagttcgtgcagttcatggccaacttaatgatggcggctttgatagccagcgttatgccattgcccagcatcagccgctcaccggccgttttctgcaggcaagtgtcattgaaccgaattgtagcctgcgtgcacagtatctggcgagtctacaaacaacgctgcaaccctatccgtggaatgcggttattcttggtttaggtatgggggaacggttatccgtccccaaagaaatcaaaaatatcatgcgcgatactggaacggcgcatttaatggcgataagcggattgcacatcgcttttgcggcgttgctggctgccggactcattcgcagtggacaaatttttctgcctgggcgctggatccactggcaaataccattaattggcggaatctgctgtgctgctttttatgcctggttgacgggaatgcaacctcctgcattgcgtaccatggtggcgcttgctacgtggggaatgcttaagttaagtgggcgacagtggagtggctgggatgtatggatatgttgtctggcggcaattttgctgatggatcctgttgccattctcagccaaagtttatggctctctgccgctgcggtcgcggcattgatattttggtatcagtggcttccctgtcctgagtggcaactgccgccggtattgcgtgcagttgtttccctcatccatctgcaactgggaatcacacttctgcttatgcccgtgcaaatcgtcatatttcatggcattagtctgaccagctttattgcaaatctattagcaattcccttggtgacatttatcacggttccgttgatcctcgccgcgatggttgtgcatttaagcgggccgttaatcctggagcaagggttatggtttcttgccgaccggtctttggctttacttttctgggggttaaagagtttgccggaagggtggatcaacattgctgaatgttggcaatggctaagtttttccccatggttcttactggtggtatggcgattaaacgcctggcgaacgttgccagcaatgtgtgtggctggaggcttgctgatgtgctggccgctgtggcaaaaacctcgacctgacgagtggcagctgtacatgcttgatgtcgggcaagggctggcaatggtgatagccagaaacggcaaagcgattctctatgacacaggactggcctggcctgaaggggatagtgggcaacaactgattatcccctggctccactggcataatcttgaaccggaaggcgttattctgagccatgaacatctggatcaccggggagggctggatagtatattgcatatatggccgatgttatggatcagaagtccgttaaactgggaacatcatcagccctgtgtgcgtggcgaagcgtggcaatggcaaggattgcgtttcagcgcgcactggcctttacaaggtagcaacgataaaggaaataaccattcctgtgtggttaaggttgatgacgggacgaatagcattcttctaaccggtgatattgaagccccagctgaacaaaagatgctaagccgttactggcagcaagtgcaggcaacattgcttcaggtacctcaccatggcagtaataccagtagtagcttgccattaattcagcgagtgaatggaaaagtggcactcgcaagcgcaagccgctataacgcatggcgactgccctctaacaaagttaagcatcgctatcaactgcaaggatatcaatggattgatactccacatcaaggtcaaacaacggtcaattttagtgcgcaaggctggcggattagcagcctcagggagcaaattttacctcgttggtatcatcagtggtttggcgtgccagtggataacgggtaaaatatgcggctatttcaacaaatgctggttttttgaatgcataacgacaaagatctctctacgtggcagacattccgccgactgtggccaaccattgcgcctttcaaagcgggtctgatcgtggcgggcgtagcgttaatcctcaacgcagccagcgataccttcatgttaagcctccttaagccacttcttgatgatggctttggtaaaacagatcgctccgtgctggtgtggatgccgctggtggtgatcgggctgatgattttacgtggtatcaccagctatgtctccagctactgtatctcctgggtaagtggaaaggtggtaatgaccatgcgtcgccgcctgtttggtcacatgatgggaatgccagttagtttctttgacaaacagagtacgggtacgctgttgagtcgtattacctacgattccgaacaggttgcttcttcttcttccggcgcactgattactgttgtgcgtgaaggtgcgagcatcatcggcctgttcatcatgatgttctattacagttggcaactgagcatcattttgattgtgctggcaccgattgttagcattgcgattcgcgttgtaagcaagcgttttcgcaacatcagtaaaaacatgcagaacaccatggggcaggtgaccaccagcgcagaacaaatgctgaagggccacaaagaagtattgattttcggtggtcaggaagtggaaacgaaacgctttgataaagtcagcaaccgaatgcgtcttcaggggatgaaaatggttagtgcctcttccatctctgatccgatcattcagctgatcgcctctttggcgctggcgtttgttctgtatgcggcgagcttcccaagtgtcatggatagcctgactgccggtacgattaccgttgttttctctagtatgattgcactgatgcgtccgctgaaaagcctgaccaacgttaacgcccagttccagcgcggtatggcggcttgtcagacgctgtttaccattctggacagtgagcaggagaaagatgaaggtaagcgcgtgatcgagcgtgcgactggcgacgtggaattccgcaatgtcacctttacttatccgggacgtgacgtacctgcattgcgtaacatcaacctgaaaattccggcagggaagacggttgctctggttggacgctctggtagcggtaaaagtaccatcgccagcctgatcacgcgtttttacgatattgatgaaggcgaaatcctgatggatggtcacgatctgcgcgagtataccctggcgagcttacgtaaccaggttgctctggtgagccagaatgtccatctgtttaacgatacggttgctaacaacattgcttacgcacggactgaacagtacagccgtgagcaaattgaagaagcggcgcgtatggcctacgccatggacttcatcaataagatggataacggtctcgatacagtgattggtgaaaacggcgtgctgctctctggcggtcagcgtcagcgtattgctatcgctcgagccttgttgcgtgatagcccgattctgattctggacgaagctaccagcgctctggataccgaatccgaacgtgcgattcaggcggcactggatgagttgcagaaaaaccgtacctctctggtgattgcccaccgcttgtctaccattgaaaaggcagacgaaatcgtggtcgtcgaggatggtgtcattgtggaacgcggtacgcataacgatttgcttgagcaccgcggcgtttacgcgcaacttcacaaaatgcagtttggccaatgatcgaaaaaatctggtctggtgaatcccctttgtggcggctattgctgccactctcctggttgtatggcctggtgagtggcgcgatccgtctttgctataaactaaaactgaagcgcgcctggcgtgcccccgtaccggttgtcgtggttggtaatctcaccgcaggcggcaacggaaaaaccccggtcgttgtctggctggtggaacagttgcaacagcgcggtattcgcgtgggggtcgtaagccggggatatggtggtaaggctgaatcttatccgctgttattgagcgcagataccacaacagcacaggcgggtgatgaacctgtgttgatttatcaacgcactgatgcgcctgttgcggtttctcccgttcgttctgatgcggtaaaagccattctggcgcaacaccctgatgtgcagatcatcgtaaccgacgacggtttacagcattaccgtctggcgcgtgatgtggaaattgtcgttattgatggtgtgcgtcgctttggcaatggctggtggttgccggcggggccaatgcgtgagcgagcggggcgcttaaagagcgttgatgcggtaatcgtcaacggcggtgtccctcgcagcggtgaaatccccatgcatctgctgccgggtcaggcggtgaatttacgtaccggtacgcgttgtgacgttgctcagcttgaacatgtagtggcgatggcggggattgggcatccgccgcgcttttttgccacgctgaagatgtgtggcgtacaaccggaaaaatgtgtaccgctggccgatcatcagtctttgaaccatgcggatgtcagtgcgttggtaagcgccgggcaaacgctggtaatgactgaaaaagatgcggtgaaatgccgggcctttgcagaagaaaattggtggtatttgcctgtagacgcacagcttagtggtgatgaaccagcgaaactgcttacgcaactaaccttgctggcttctggcaactaattacgccgcggcagcgttcgattgatggagtcatgaatgagcctgccgcacctctcccttgctgatgcgcgtaatcttcaccttgccgcacaaggcctgttaaacaaaccccgccgtcgagcgagcttggaggatattccggcaacgatctcccgcatgtccttgctgcaaatcgataccatcaatattgttgcccgtagtccatatctggtgcttttcagtcgtctgggaaattatcctgcccagtggctggatgagtctctggcgcgtggcgaattaatggaatactgggcgcatgaagcctgctttatgccgcgtagcgactttcgtcttattcgccaccgcatgctggcacctgaaaaaatgggctggaaatacaaagacgcctggatgcaggaacatgaggcggaaattgcacagttaattcagcatattcatgataaggggccggtacgtagtgccgattttgagcatcctcgtaaaggtgcaagcggctggtgggaatggaagccgcataaacggcatctggaaggtttatttactgccggaaaggtgatggtgattgaacggcgcaacttccagcgcgtttatgatttaacccaccgtgtcatgcctgactgggatgatgagcgcgatctcgttagccaaacagaagcagaaatcatcatgctggataacagtgcgcgtagcctgggaatattccgcgaacagtggctggcagattactatcggctgaaacgtccggcactggcggcgtggcgcgaagcgagggctgaacagcagcaaatcattgctgtgcatgttgaaaaattgggcaatctttggctgcatgatgatttgctgccgctactcgagcgagcgctggccggaaagctcactgcaacgcacagcgcggtacttagcccttttgatcctgttgtctgggatcgcaaacgcgcagagcagctttttgattttagctaccggctggagtgctataccccagcgccgaaacgccagtatggctattttgttctgccgttattacatcgtgggcaattagttgggcgaatggatgccaaaatgcatcgccagacaggcatccttgaagttatctctctgtggttacaggaaggtattaaaccaacgacaacgctgcaaaaagggctacgtcaggcgattactgatttcgctaactggcagcaggcaacgcgggtgacattaggatgctgcccgcaaggcctctttactgattgccgcaccggctgggaaatagaccccgtcgcataaatgattatgataagatttatgcattcataacccgatccatctggaggaactatggatcatcgtctgcttgaaatcattgcctgcccggtttgcaacggaaaactttggtataaccaggaaaaacaagagcttatttgcaaactggacaacctcgctttcccgctgcgtgatggcattccagtgttgctggaaacggaagcccgcgtgctgactgctgatgagagtaaaagttgatgtaaactgctgatgagagtaaatcatgagttttgtggtcattattcccgcgcgctacgcgtccacgcgtctgcccggtaaaccattggttgatattaacggcaaacccatgattgttcatgttcttgaacgcgcgcgtgaaagtggtgccgagcgcatcatcgtggcaaccgatcatgaggatgttgcccgcgccgttgaagccgctggcggtgaagtatgtatgacgcgcgccgatcatcagagtggaacagaacgtctggcggaagttgtcgaaaaatgcgcattcagcgacgacacggtgatcgttaatgtgcagggtgatgaaccgatgatccctgcgacaatcattcgtcaggttgctgataacctcgctcagcgtcaggtgggtatggcgactctggcggtgccaatccacaatgcggaagaagcgtttaacccgaatgcggtgaaagtggttctcgacgctgaagggtatgcactgtacttctctcgcgccaccattccttgggatcgtgatcgttttgcagaaggccttgaaaccgttggcgataacttcctgcgtcatcttggtatttatggctaccgtgcaggctttatccgtcgttacgtcaactggcagccaagtccgttagaacacatcgaaatgttagagcagcttcgtgttctgtggtacggcgaaaaaatccatgttgctgttgctcaggaagttcctggcacaggtgtggatacccctgaagatcttgagcgcgttcgcgctgaaatgcgctaatttcacttcacgacacttcagccaattttgggaggagtgtcgtaccgttacgattttcctcaatttttcttttcaacaattgatctcattcaggtgacatcttttatattggcgctcattatgaaagcagtagcttttatgagggtaatctgaatggaacagctgcgtgccgaattaagccatttactgggcgaaaaactcagtcgtattgagtgcgtcaatgaaaaagcggatacggcgttgtgggctttgtatgacagccagggaaacccaatgccgttaatggcaagaagctttagtacgcccggaaaagcccgacaactggcatggaaaaccaccatgctggcaagaagtgggactgtccgtatgccgactatttatggtgtgatgacgcatgaagaacaccccggccccgatgtcctgctactggagcggatgcgtggtgttagcgtggaggcaccagcccgaacaccagaacgctgggaacaactcaaagaccaaatcgttgaagccttactggcctggcaccgtcaggacagtcgcggttgcgtcggcgcggtcgacaatactcaggaaaatttctggcccagttggtaccggcaacatgttgaagtgctatggaccacgctcaatcagttcaataacaccggtctgacgatgcaggataagcggatcctgtttcgcactcgcgaatgtctcccggcattatttgaaggctttaacgacaattgtgtgctgattcacggtaacttctgtttacgcagcatgttgaaagatagccgcagcgatcagttactggcgatggtcgggccgggactaatgctttgggcaccgcgagaatacgaactgttccgactaatggataattctctggcggaagatttgctctggagttacctgcaacgcgcgccagtggcggagagcttcatctggcggcgttggttgtatgtgttatgggatgaagttgcgcaactggttaataccggacgatttagtcggcgcaacttcgatctggcaagtaaaagtctcttgccgtggctcgcctgatcactcttgccgtggctcgccactgctaccttttagccactgccagatacggccaagcgtttcatagccaacacgatcgctatgcatcaaccagaccggagaagggattgcccgttcccacgggttaagcgggctgtcgatggccaactgattcgccggggctggtagcggatttaacccttcctgctgaaaaaagatcatcgcccgcggcagatgacttgcggaggtcaccagcaggaaaggggcgtcaccaatcgcctgtttcactgctgcagcttcttcttcggtatcttttggcaaatccagggtgataatttgctcgcgcggcacgcccaggctttgcgcaactctggcacctacttccgctgtactcaccgtattggtttttgctacgcctcccgtgaagatcagtttacttcccggattttcgcgccataagcgaataccttcattcaggcgtggcagactgttattgattaaattagagctcggtgcccactgcgggttccaggtataaccacctccgagcaccacgatatagtccactttttggctattattccatgtcggataggtgctttcgatgggacgcagcaggcggtcggctaccggttgcaaactcaataacaagagcgccagccacccaatgctaataaaaatcttcccggttttttgaaaacggctaaaccacagcagcgccaggccagcgccaataatcaacaacatcagcggaagtggcagcaacatattgccaatcacttttttcagtgtaaaaagcatcctttctggttccttttttaaccatatagcaagggatcgccagcgatattacaccagacgggttcattctcgccgtggctgtgacaaaatagcgtctttatcagaaaacgtcttagccaaccggtggagaaagcaatgcaggatcgcaattttgatgatattgcggaaaagttttcccgtaacatttacggcaccaccaaagggcagcttcgacaggctattctgtggcaggatctcgatcgcgtgctggcggaaatgggcccgcaaaaactgcgtgtgctggatgctggcggtggagaagggcagaccgcaatcaaaatggccgagcgtgggcatcaggtcattttatgcgatctttctgcgcagatgatcgaccgcgcaaaacaggcggcagaagcaaaaggtgtgagcgacaacatgcaatttatacattgcgccgctcaggatgttgctagccatttggaaacgcccgttgatctgatattgttccatgcggtgctcgagtgggtggctgatccccgcagcgtattgcagaccctctggagtgtgttgcgtccaggcggcgtgttgagcttaatgttctacaatgcgcatggtttgttgatgcataacatggtcgccgggaattttgattacgtgcaggcgggaatgccgaaaaagaaaaaacggacgcttagcccagattatccacgcgacccggcgcaggtttatctgtggctggaagaagctggttggcaaattatgggtaagacaggcgttcgcgtgtttcatgattatctgcgcgagaaacaccagcagcgcgactgctatgaagcattacttgaattagaaacgcgttattgccgtcaggaaccgtatattaccctggggcgttatattcatgtcaccgcgcgcaaaccgcagagcaaggataaagtatgagtgaattttcccagacagtccccgaactggttgcctgggccagaaaaaatgacttctccatcagcctgccggtagaccgactctcttttctgctggcggttgccacgctgaacggcgagcgtctggatggtgagatgagtgaaggcgagctggtggatgcattccgccatgtgagtgatgcgtttgagcaaaccagcgaaaccatcggcgtgcgcgccaataacgcgatcaacgacatggtgcgtcaacgtctgctgaaccgctttaccagcgagcaggcggaagggaacgcaatttaccgtctgacgccgctcggcatcggcattactgactactacatccgtcagcgcgagttttctacgctgcgtctttctatgcagttgagcattgtggcgggtgagctcaaacgcgcagcagatgccgccgaagagggcggtgatgaatttcactggcaccgtaatgtctatgcgccactgaaatatagcgtagcagaaattttcgacagtatcgacctgacgcaacgtctgatggacgaacagcagcagcaggtgaaggacgatatcgcccagttgctgaacaaagactggcgggcggcgatttccagctgtgaattgttgcttagcgaaacttccggaacgctgcgtgaattgcaggatacgctggaagcggcaggcgacaaattgcaggctaatctgttgcgcattcaggatgcgacgatgacccatgacgatctgcatttcgtcgatcgtctggtgttcgatctgcagagcaaactcgatcgtattatcagttggggccagcaatccatcgacttgtggattggctacgaccgccacgtacacaaatttattcgtaccgcgatcgatatggataaaaaccgcgtctttgctcagcggttacgtcagagcgtacaaacctattttgatgagccgtgggcgctaacttatgccaatgccgatcgtctgctggatatgcgtgacgaagagatggcactgcgcgatgaagaagtgactggggaacttcctgaggatctggaatacgaagagtttaacgagatccgcgaacagctggcggcgatcatcgaagaacaacttgccgtgtacaaaaccagacaagtgccgctggatcttggtctggtggtacgcgaatatctgagtcagtatccgcgtgcacgtcactttgacgttgcgcgtattgttattgatcaggcggtacgtcttggcgtagcgcaagcagatttcaccggactgccagcgaaatggcagccgattaatgattacggagccaaggtacaggcgcatgtcatcgacaaatattgaacaagtgatgccggttaagctggcgcaggcgctggcgaatccgttatttccggcgctggacagcgccttacgtagtggacgccatattggcctcgacgaactggataatcatgcattcctgatggattttcaggaatatctggaagagttttacgcgcgttataacgttgagcttattcgcgcaccagaagggttcttctatttacgcccacgttccaccacgctgatccctcgttccgtcttgagcgaactggatatgatggtcgggaaaatcctctgttatctctatctcagcccggaacggctggcgaatgaggggattttcacccagcaggaactgtacgacgaactgctcaccctggccgatgaagcaaaactgctgaaactggtgaacaaccgtagtaccggtagtgacgttgaccgtcagaagttgcaggagaaagtacgttctagcctcaaccgtctgcgtcgtttaggcatggtgtggtttatgggccacgacagcagcaagtttcgcattaccgaaagcgtgttccgcttcggagccgatgtgcgtgctggcgacgatccccgtgaagcacagcgtcgcctgattcgtgatggcgaagcaatgccgattgaaaatcatctgcaactcaacgatgaaaccgaagagaatcagccagatagcggagaggaagaataatgattgaacgcggtaaatttcgcagtctgacgctgattaactggaacggcttttttgcccgaacttttgaccttgacgagctggtcacgacgctttctggcggtaacggggcgggtaaatccaccaccatggcggcgttcgttacggcgctgatccccgacctgaccctgctgcatttccgtaacactacggaagccggggccaccagcggtagccgcgataaaggtctgcacggtaagctgaaagcgggtgtctgttatagcatgctcgacaccattaacagccgccaccagcgcgtggtggtcggtgtgcgtctgcaacaggttgccggacgcgatcgtaaagtggatatcaagccgtttgccattcagggactgccgatgagcgtgcagccgacacagctggtgaccgaaaccctgaacgaacgccaggcgcgcgtgctgccgcttaacgagctgaaagacaagctcgaggcgatggaaggcgtgcagtttaaacagttcaactccattactgattaccacagcctgatgttcgatctgggcatcatcgcgcgtcgtctgcgctccgcatctgaccgtagcaaattctatcgtctgatcgaagctagcctgtatggcgggatctccagtgccattacccgttctctgcgcgactacctgttgccagaaaacagcggcgtgcgtaaagcgttccaggacatggaagcggcgctgcgtgaaaaccgtatgacgctggaagcgattcgtgtcacccagagcgaccgcgacctgtttaagcatctgatcagcgaagccaccaactacgtggcggcggactacatgcgtcacgccaacgagcgccgtgtccatctcgacaaagccctggagtttcgtcgcgagctacatactagccgtcagcaactggcggctgagcagtacaaacacgtcgatatggcgcgtgagctggcagagcacaacggtgccgaaggcgatctggaagcggattatcaggcggccagtgatcacctgaacctggtgcaaaccgcactgcgtcagcaggagaagatcgaacgctacgaagcggatctcgatgagctgcagatccgtctggaagagcaaaatgaagtggtggcagaagccatcgaacgccagcaagagaatgaggctcgtgcggaagctgccgaactggaagtggacgagctgaaaagccagcttgctgactaccagcaggcgctggacgtccagcaaacgcgcgcgatccagtataaccaggcgattgctgcgcttaatcgtgccaaagaactgtgccatctgccggacttaaccgccgactgcgccgccgaatggctggaaaccttccaggcgaaagagctggaagcgactgaaaaaatgctctctcttgagcagaaaatgagcatggcgcaaaccgcgcacagccagtttgagcaggcttatcagctggtggtggcaatcaacggcccactggcgcgtaacgaggcgtgggatgtcgctcgcgaactattgcgcgaaggggtcgatcagcgtcacctggcagagcaggttcagccgctgcggatgcgattaagcgaactggaacagcgtctacgcgagcagcaagaagctgagcgtctgctggcagatttctgcaaacgtcagggcaagaattttgatatcgacgaactggaagccctgcatcaggaactggaagcacgcattgcctctctttccgatagcgtgtctaacgcccgtgaagagcgcatggcactgcgccaggagcaggaacagctgcagtctcgcattcagagtttgatgcagcgtgcgccggtttggctggcagcgcaaaacagtctcaaccagttgagcgaacagtgcggcgaagagtttacctccagccaggacgtcaccgaatatctgcaacagttgctggagcgtgagcgagaggcgattgttgaacgcgatgaagtgggcgcgcgcaaaaacgccgtcgatgaagagatcgaacgtttaagccagcctggcggctctgaagatcagcgtctgaacgcgctggcggagcgttttggtggtgtgctgctgagtgaaatttatgacgacgttagcctggaagatgcgccgtacttcagtgcgctgtatggcccgagtcgccacgccatcgtggtgccagatctgagtcaggtaactgaacacctggaaggcttgaccgattgcccggaagatctctatctgatcgaaggagatccgcagagtttcgatgacagcgtgttcagcgttgatgagctggaaaaagcggtagtggtgaaaatcgccgatcgtcagtggcgttatagtcgtttcccggaagtgccgctgtttggtcgtgctgcgcgtgaaagccgtattgaaagcctccatgccgagcgtgaagtgctttccgaacgcttcgccacgctctcctttgatgtacagaaaactcagcgtctgcatcaggcgttcagccgctttatcggcagtcatctggcggttgcgtttgagtctgacccggaagcagaaatccgtcaactgaacagccgtcgcgtcgaactggagcgggcgttaagtaatcatgaaaatgataaccagcagcagcgtattcagtttgagcaggcgaaagagggcgttacggcgctgaaccgcattctgccgcgtctcaacctgttggctgatgacagcctggcggatcgcgtcgatgaaatccgcgaacgtctggatgaagcccaggaagccgcgcgttttgttcagcagtttggcaatcaactggcgaaactggaaccgattgttagcgtattgcagagcgacccggaacagttcgaacagttaaaagaagattacgcgtactctcagcagatgcagcgcgatgcccgtcagcaggcgtttgccctgacggaagtggtgcagcgtcgtgcgcactttagctattctgacagcgcagaaatgcttagcggtaacagcgatctcaacgaaaaactgcgtgaacgtctggaacaggcggaagcggagcgtacccgcgctcgcgaagcgttgcgcggtcacgcagcgcagttgagtcagtacaaccaggtgctggctagcctgaaaagttcttacgacaccaaaaaagagctactcaacgatctgcaacgtgaattgcaggatatcggcgtgcgtgctgatagcggggcagaagagcgggcgcgtattcgccgtgacgagctgcatgcgcaactgagcaataaccgtagtcgccgcaatcaactggaaaaagcgcttaccttctgcgaagcggagatggacaacctgacccgcaaactgcgcaagctggagcgggattactttgagatgcgcgagcaggtagtgaccgccaaagcgggctggtgtgcggtgatgcgcatggtgaaagataacggcgttgagcgccgcttacaccgtcgtgagctggcttatctctccgctgatgatttgcgttccatgagcgataaggcgttaggtgcgctgcgtctggcggtggcggataacgaacatctgcgcgacgtgctgcgcatgagcgaagatccgaaacgtccggagcgtaaaattcagttcttcgtggcggtttatcagcatctgcgtgaacgtattcgtcaggatattattcgtaccgatgatccggtggaagctatcgaacagatggagattgaacttagccgtctgaccgaagaattaacctcccgtgaacagaaactggcgatcagttcccgcagcgtggcgaacatcattcgcaaaaccattcagcgcgagcagaaccgtatccgtatgctcaaccaggggttgcagaacgtaagctttggtcaggtgaacagcgtgcgtctcaacgtgaacgtgcgtgaaacgcacgccatgctactggatgtgctctctgaacagcacgagcagcatcaggatctgtttaacagcaaccgtttgaccttcagcgaagcgctggcgaaactgtatcaacgtcttaacccgcagattgatatggggcagcgcacgccgcagaccatcggtgaagaactgctggattaccgcaactatctggaaatggaagttgaggttaaccgtggttccgatggctggctgcgcgcagagtctggtgcattgagcaccggtgaggcgattggtaccggtatgagcattctggtgatggtggtacaaagctgggaagatgaatctcgccgcctgcgcggtaaagatatctctccttgccgcctgctgttcctcgatgaagcagcgcgactggatgctcgttctatcgccacgctgtttgaattgtgtgagcgtttgcaaatgcaactcatcatcgcagcgccggaaaatatcagcccggagaaaggcaccacctataaactggtgcgtaaagtcttccagaataccgaacacgttcatgtcgtcggcctgcgaggatttgcgccgcaactccctgaaacgcttccaggaactgacgaagcgccttctcaggcgagttaaaattaaggcggcagcaatgccgccttttctttttccgaaaactccgtttctgcactaaaaaagtggcacattacggcgcgcttttctttaaacttctttacattaggttatgtaaaaacgtatcggcgtttatatactgaagataagcctgatgagtaacaggcttgctcgtcatactttcgtgagtattggcgttgtacaggcaagtcgtaaaataacagcctggctattcagagtatgataaaaacagggggcaagggatgttgcttaatatgatgtgtggtcgtcagctgagcgcaatcagtttgtgcctggccgtaacattcgctccactgttcaatgcgcaggccgatgagcctgaagtaatccctggcgacagcccggtggctgtcagtgaacagggcgaggcactgccgcaggcgcaagccacggcaataatggcggggatccagccattgcctgaaggtgcggcagaaaaagcccgcacgcaaatcgaatctcaattacccgcaggttacaagccggtttatcttaaccagcttcaactgttgtatgccgcacgcgatatgcaacccatgtgggaaaaccgtgatgctgttaaagccttccagcaacagctggcagaggtggcgattgccggtttccagccgcagtttaataaatgggtagagttactgaccgatcctggtgttaacgggatggcacgcgacgtggtgctctctgatgcgatgatgggctatctccatttcattgcaaatattccggtcaaaggcactcgctggctatatagcagtaaaccttatgcacttgcaacgccgccgctcagcgtgattaaccaatggcagctggcgctggataaaggtcaattgcctacgtttgttgcaggactggcaccgcagcatccgcaatatgcggcgatgcatgaaagcttactggccttactctgtgacaccaaaccgtggccccaactgaccggcaaagcaacgttgcgcccagggcagtggagtaacgacgtaccggcgttgcgcgaaatattgcaacgcacaggcatgttggacggggggccgaaaattactctacctggcgatgacacgccaactgacgcggtagtcagcccatccgctgttactgttgaaacagcagaaactaagccgatggataagcaaacgacgtctcgtagtaaacctgcgcctgccgttcgcgccgcctacgataatgaactggtggaagccgttaaacgttttcaggcatggcaaggattgggggcagatggtgctattggcccggcaacacgtgactggttaaacgtaacgcccgcccagcgtgctggtgtgttggctctcaacatccagcgattgcgcttgctgccaacagagctttctaccgggatcatggttaacattccggcctatagcctggtctactatcagaacggcaatcaggtgctggatagccgagtcattgtcggtcgccccgatcgcaaaacgccgatgatgagcagtgcccttaacaacgtagtggtaaacccgccgtggaacgtacctccaactctggcacgcaaagatattctgccaaaagtgcgcaacgatccgggatatctcgaaagccatggctatacggtgatgcgcggctggaacagcagagaagcgattgacccatggcaggttgactggtctacaatcacggccagcaatttaccgttccgcttccagcaggctccaggcccacggaacagcctggggcgctataaattcaatatgccgagtagtgaggccatttatttgcatgacacgccgaaccacaatctgttcaagcgtgatacacgcgcattgagcagtggctgtgtacgagtgaataaagcttccgatctggcgaatatgctgttgcaggatgcaggctggaatgacaaacgtatttctgatgcgctgaagcagggtgatacacgttacgtcaatattcggcagagcattccggtgaatctctactacctgacggcctttgttggtgcagatggtcgtacccagtatcgtacagatatttacaattatgatctgcctgcgcgatccagcagccaaatcgtaagcaaagcggaacaattaatcaggtaaatgaagtagttcggggaaatcagttgtcgtaataattagcatgattgggggcgattctctgcagcccccgtcactgctggggttgagtcatcttgacgtctgctttacgggcggttaaggtgcctcttgtgcgccagaagtgcatataaacgataacattgacctgtagacttgattatcatggacaaattcgacgctaatcgccgcaaattgctggcgcttggtggcgttgcactcggtgccgccatcctgccgacccctgcgtttgcaacactctctaccccacgcccgcgcattttgacactcaataatcttcataccggagagagtatcaaagcggagtttttcgatggcagaggctatattcaggaagaattggcaaaacttaaccattttttccgcgattaccgcgcgaacaaaataaagtccatcgacccaggattattcgaccagttgtatcgcctgcaagggttgttaggcacgcgcaaaccggtgcaactcatttccggttatcgttctattgataccaacaatgaactacgcgcccgcagccgtggagtagcgaagaaaagctatcacactaaaggccaggcgatggatttccatattgaaggtatcgcgttaagcaatattcgcaaagccgcgttatctatgcgcgcaggtggtgtaggatattatccacgtagtaactttgtgcatattgataccgggccagcacggcactggtaataattgcttaacgaaacaggggcagtatgaactatcgtattattccggtcaccgcattctcccagaactgtagtttaatctggtgtgaacaaacccgtctggccgcactggtcgatcctggcggcgatgcggaaaaaatcaaacaggaagttgatgacagcggcctgacactgatgcagatcctgctgacgcatggtcatctggaccacgttggcgcagcggcggaactggcgcaacattacggcgtgccggttttcggcccggaaaaagaagatgagttctggctgcaaggcttgcctgcgcaaagtcgtatgtttggtctggaagagtgccagccgctgacgccagatcgttggctgaacgaaggcgataccatcagcatagggaatgtgactttacaggtgttacattgccctgggcatacgccgggtcatgtcgtgttttttgatgatcgggcaaagctgctgatttctggcgatgttattttcaaaggcggagtagggcgcagtgacttcccgcgtggcgatcataatcaactgatttctagtatcaaagataaattgctgccactgggggatgacgtgatatttattccgggtcacggaccattatccacacttggttatgaacgcctgcataatcccttcctgcaagacgaaatgcccgtctggtaaggcacataaaaaagcccgcttttaatgctggcctggatttctggcaaagtgcgctttgtttatgccggatgcggcacgagcgccttatccggcctacaaaatcgtgcaaattcaaaatattgcaggggacgcgtaggcctgataagcgtagcgcatcaggcaatgttgcgtttgtcatcagtctcagcccgcttttcagcgggcttcattgtttttaatgcttacagcactgccacaatcgcttcgcacagcggagccatgttatctggtgtcatcccggccacatttacgcgaccagaagcaaccgcatatacgccaaactcttcgcgcagacgcagcacttgttcttttgtcaggccactgaaggagaacatgccgttctgtttgatgataaagctgaagtcgcggtttgcgcctttttcctgcagcgtattgacgaacaactgacgcatacgctgaatacgctggcgcatatcagtcagctcttgttcccaaatcgcacgtaacgcatcgttgctcaggatggtggcaacaacagaagcgccgtgtgctggtgggttagagtagttagcgcgaatcgccgctttcatttggctgaatgcgcgatcaacggtttcactgtcggcagcaaccagagtacaagcgccaacacgctcgttgtacaggccaaagtttttagagtaggaactggcaacaatcagctctttatgcatagccgcgaaagcgcgcagtccttcagcatcttcttccagaccacgggcaaaaccctggtaagcgaagtcaaacagcggtaaccagcctttctcaacggagagttgtgccagtgtttgccattgttccagcgtagggtcgataccggttgggttatggcagcagccatggaacagcactacgtcgccagcctgagcttcattcaggctgttaatcagtgcatcgaagtcaagagtgtgattttccgcatcataataagcgtattcacgaacttccagacctgcagagttaaagacgctcttatggttcggccagcttgggttgctcacccacacacgcttaacgctggtattttttgccaggaaatcggcagccacgcgtagtgcgccagtgccccccggagtctgtgccgtgcgagcacgtttgtcattgatcagggcgctacctttaccaaacagcagttcctgagtgcagcgaccaaattcagggatgccgtcaatgccgaggtaatttttggtggtttcattttcgagcagatactgttcagcctttttcacgctggtcagtaccggggttttgcccgtctcatctttatagacaccaatcccgaggttaattttgccgggacgttcatcggcacgaaacagatcggccaggcccagaatcgggtcggcaggagcggcggtaatgttctcaaacatgacgaggttccattatggttacagaagggaagtccgctatcagggtaacgggagatttacaaaattccaactattactgatgaaaacgcaggctgtttttgcaagacgtgagattgctctggaaggtataaaaaaaacaggaccaaagtcctgttttttcggcatttaacaaagaggtgtgctattagaactggtaaacgatacccacagcaacggtgtcgtcactacctacgcccagtttgttgtcagaatcgatctggttgatgatgtagtcaacataggtggacatgtttttgttgaagtagtaggttgcgcccacttcaaagtagttcaccagatcaacatcaccgataccttctacgtctttcgctttagatttggtgtaagcgatggacggacgcagaccgaaatcgaactggtattgcgcaactaacagaacgtcttgcgttttgttggcgaagccgctggtgtttgtaaatttattagtgatcggcgtagcgttacgggtttcaccgtagttcgctgccaggtagatgttgttcgcgtcgtacttcagaccagtagcccactgttcagcttttttaccgttgccaagaggttgagcttcttgcaggttggtacggtcagctgcaccataagcaccaacgataccaaagccttcgtattcgtagctgatagaaccgccaacaccgtcgccgttagaacggcgtgcagtgtcacgctcgtttttacccaggtactgaacagcgaagttcaggccatcaaccagaccaaagaagttggagttacgataggtagcaacgccgccaacacgaccaacgaagaagtcatcgctgtatgcagtatcaccaccaaattctggcagcatatcggtgtaacccagtgcatcataaaccacaccgtagttacggccgtaatcgaaagaaccaacgtcagcgtatttaagacccgcgaatgccagacgcgttttgttaccagtttgagcgtcagcgccttcagagttgttaccctggaagttatattcccactgaccataaccggtcagatcggaattgatttgagtttcccctttaaaaccaagacgggcataggtcatgtcgccattgccaccgtaactgttttcaccgttacccttggaaaaataatgcagaccaacagctttaccgtacagatctactttgttgccatctttgttatagatttctgcagcgtttgcagtacctgctactaacagagcagggacgatcactgccagaatattgcgcttcatcattatttattaccctcatggttttttttatgacacctgccactgccgtcaataagttctgtcaataaaaatttacggaactattgatgagagtttggtgtctttatgtgtctgcaggcatctttccattcaaactaacgtttcgctaccgtgaaagtgctacaaagataaagatttggtttcaaaaagaaaaaatatgtaaccaaaagtaaaatttaaggaactttgtgaacaccgtcatatttccatagagacgtgatgatatttacagcaattttaatctatttatatgatttccttatatttaaattaactaaacggaaattttgtttctgatggaaactttatcgacctggcacaaaatcttctttcagacatccagaatgccaaaaaatagtatgaaaattgtgctattagctaagaaaaaactaatccgcaataagaatgcggattagtttttgcgcgtaaatgttgcaatgtaatattccgtaacaggatgatcgttatggcggggttgcaaatagattgcttgacttaacaaacagataacttgacagaaaagataaaaaaagagccagcgggcgctggctcttgaagacgctaaattagaagctggcgttacgcggagtacgtgggaacggaatcacatcacgtacgttttgcacgccagttacgtaagcaatcagacgttcaaaaccaagaccgaaaccactatgcggaacagtaccgtagcgacgcagatcgcgataccaccagtaatcttctttattcaggcccatttccagcatacgctcgtccagcacgtccagacgttcttcacgctgggagccaccaatgatctcaccgatgcccggagccagaacgtccatagccgcaacggttttaccgtcttcgttaaggcgcatatagaacgctttaatatctttcggatagtttttaaccactaccggtgctttaaagtgttcttccgccagataacgctcatgctcagaagagagatcgactccccagtaaaccgggttttcaaacttcctgccgcagttttcgagaatggtcactgcgtcggtataatccacctgcgcaaaatcggcttcaatgaagcgttccagacgactaacggcatctttatctacgcgttcagcgaagaatttcatgtcgtcagcgcgttcttcgagaaccgctttgaagacatatttcagcatggcttcagccagacccgcaatatcgttcaggttagcaaacgccacttccggctccagcatccagaattccgccaggtgacggctggtgttggagttttcagcacggaaagtcgggccgaaggtataaattttggacaatgcgcaagcgtaggtttcgccgttcaactggccagatacggtcaggaaagactctttaccaaagaagtctttgtcgaaatccactttgccctgatcgttacgcggcaggttttccagatccagcgtagaaacgcggaacatttcgcctgcaccttcggtatcagatgcggtaatcagactcgtactaacccagaagaatccctgctcgttaaagaagcgatgcagcgcctgcgccagcgtatggcgaacgcgcgcgacggcaccaatcaggtttgtgcgcggacgcaggtgagcgacttcacgcagatactcaatgctgtggcgttttgccgccatcgggtaagtgtctggatcttcaacccaaccagcaacttcaaccttgctggcctgaatttcaaattgttgcccctggcccgggctcgccacgactttacccgtcacaatgacgctgcagccggtggtcagacgcaggacgtcttcattgtaattgggcagagaattattgatgacagcctgtacaggatcaaagcaggaaccgtcataaacggcgaggaaggagatgccagctttactatctcggcgggtacgtacccatccgcgcacggtgacttcgctgtcaacggctacacggccctggagtacgtcggctacaggcacaacgctcataatattctctctgttaatagtcggaaaaaataaacacttgtccacccgtaaatggggggatacctatgttacctggcatctgcaatcagacaagcagaattcgcaaatgcagcgaaagatttcggaattaaaggtaaaaaaagggagccgattagctccctgatgatattaactggcttttttaatatgcggaaggtcgaacgctttgcgcagcgcccgaacaaacgctttatcatggcagatagttttgccagggctgtcagaaagtttcgccaccggtttaccgttacactctaccaacttaatgacaatattcaggggttttacctgggggatatcgcaggtcaggcgagtcccaataccaaaacttaattgcacgcgggaagagaagtggcggtatagctcaaccgctttgcgtaaatccagattgtcagagaaaaccagcgttttactctgtggatcaattcccagcttttcataatgtgcaatggctttttcaccccattcaaccgggtcgccagagtcatgacgcaggccctgataccgactagcgaactcgacaccgaaatcacgcaggaaagcatccatagtgatgcagtcggttaatgcaatgccaagttggtcgggatactcttccagccaggcagcaagtgcagctcgctggctgttggctagatccgggctgatttgctgatgtgcctggaaccattcgtgtgcctgtgttcccatcggcgtgagggaaagccgacgcgccagatcgtagttgctggtgcccacaaaccaggattcctgttgcagacgcttaacgatggtttcttgtacttcgcgagaaaaacggcgacgggtgccaaaatccatcagatggaagcggctcatatcaagaccggcggttaacgcgctgaagtcgactaatttgctttccagcgtgtcgagggcttgcgcaacgtcggcctgcggactgcgatagcgatgtaccatttcactgataaccgccagcaaaggaacttcccagaggatgacttcacgccacgggccgcttaaacgaatatccagcttgccattatcgttggacacggtgacttgttccgggttaaagcggaactcgcgtaaccagttaagatagtcggccttaaagaaaggcagggcagaaagccactgatattcatcatcctgcaggcgcaggtgctgcatcgcctgaacctgttcacgaatagcatcggcataaatacccagcagatcgtcacctcggcaacgaaactccgccgcgacatgcacatcgtaatagtgatgaaacacggcttgctgcatatgcaacttataagcatctgtatccagcaagctgtgcagaacaggagaagcgaattgtgtcataggtgcgcagtagcgtcctcgtacaggagcgtttagtacaataaacatcttcaggaactgctggagtataccttgtttcgcaatttattgaaccccgatcacaccatatgccacctttctggtcgatggcattacgcggtgtatgttataaaaatgtagcaataaaggcgtttgtacctgaaaagatgaagattctgcatagcgcgatttacgcaacaggaatagactgaacaccagactctataaaagatgctaaaggttatttatgactcaacagccacaagccaaataccgtcacgattatcgtgcgccggattaccagattactgatattgacttgacctttgacctcgacgcgcaaaagacggtcgttaccgcggtcagccaggctgtccgtcatggtgcaagtgatgctccccttcgtctcaacggcgaagacctcaaactggtttctgttcatattaatgatgagccgtggaccgcctggaaagaagaagagggcgcactggttatcagtaatttgccggagcgttttacgcttaagatcattaatgaaataagcccggcggcgaataccgcgctggaagggctttatcagagtggcgatgcgctttgcacccagtgtgaagccgaaggtttccgccatattacgtattatctcgaccgcccggacgtgctggcgcgttttaccaccaaaattattgccgataaaatcaaatatcccttcctgctttccaatggtaaccgcgttgcgcaaggcgaactggaaaacggacgccattgggtacagtggcaggacccgttcccgaaaccgtgctacctgtttgcgctggtggcaggcgactttgatgtactgcgcgatacctttaccacgcgttctggtcgcgaagtagcactggagctgtacgtcgatcgcggcaaccttgatcgcgcgccgtgggcgatgaccagcctgaaaaactccatgaaatgggatgaagaacgctttggcctggagtatgacctcgacatctatatgatcgtcgcggtggatttcttcaatatgggcgcaatggagaataaggggctgaatatctttaactccaaatatgtgctggcccgcaccgacaccgccaccgacaaagattacctcgatattgaacgcgttatcggccatgaatatttccataactggaccggtaaccgagtgacctgtcgcgactggttccagctcagcctgaaagaaggtttaaccgtcttccgcgatcaggagttcagctctgaccttggttcccgcgcagttaaccgcatcaataatgtacgcaccatgcgcggattgcagtttgcagaagacgccagcccgatggcgcacccgatccgcccggatatggtcattgagatgaacaacttctacaccctgaccgtttacgagaagggcgcggaagtgattcgcatgatccacaccctgcttggcgaagaaaacttccagaaagggatgcagctttatttcgagcgtcatgatggtagtgcagcgacctgtgacgactttgtgcaggcgatggaagatgcgagcaatgtcgatctctcccatttccgccgttggtacagccagtccggtacaccgattgtgaccgtcaaagacgactacaatccggaaaccgagcagtacaccctgaccatcagccagcgcacgccagccacgccggatcaggcagaaaaacagccgctgcatattccgtttgccatcgaactgtatgataacgaaggcaaagtgatcccgttgcagaaaggcggtcatccggtgaattccgtgctgaacgtcactcaggcggaacagacctttgtctttgataatgtctacttccagccggtgcctgcgctgctgtgcgaattctctgcgccagtgaaactggaatataagtggagcgatcagcaactgaccttcctgatgcgtcatgcgcgtaatgatttctcccgctgggatgcggcgcaaagtttgctggcaacctacatcaagctgaacgtcgcgcgtcatcagcaaggtcagccgctgtctctgccggtgcatgtggctgatgctttccgcgcggtactgcttgatgagaagattgatccagcgctggcggcagaaatcctgacgctgccttctgtcaatgaaatggctgaattgttcgatatcatcgacccgattgctattgccgaagtacgcgaagcactcactcgtactctggcgactgaactggcggatgagctactggctatttacaacgcgaattaccagagcgagtaccgtgttgagcatgaagatattgcaaaacgcactctgcgtaatgcctgcctgcgtttcctcgcttttggtgaaacgcatctggctgatgtgctggtgagcaagcagttccacgaagcaaacaatatgactgatgcgctggcggcgctttctgcggcggttgccgcacagctgccttgccgtgacgcgctgatgcaggagtacgacgacaagtggcatcagaacggtctggtgatggataaatggtttatcctgcaagccaccagcccggcggcgaatgtgctggagacggtgcgcggcctgttgcagcatcgcagttttaccatgagcaacccgaaccgtattcgtagcttgattggcgcgtttgcgggcagcaatccggcagcgttccatgccgaagatggcagcggttacctgttcctggtggaaatgcttaccgacctcaacagccgtaacccgcaggtggctagtcgtctgattgaaccgctgattcgcctgaaacgttacgatgccaaacgtcaggagaaaatgcgcgcggcgctggaacagttgaaagggctggaaaatctctctggcgatctgtacgagaagataactaaagcactggcttgataaataaccgaatggcggcaatagcgccgccattcggggaatttacccctgttttctcaggcgagtttcagattcaccacgttgcatcacccgttgcaacacctccgcttccagctccgctaatcgcacgctccctaatcgacgcggacgggggatatccactgtcaaatccagaccaatttttccctcttcaattaacagcacccggtcagccatcgctaccgcttcgctcacatcatgcgtcaccaacagtacggtaaagccgtgctcctgccaaagactcacaatcaaatcctgcatctcgagtcgcgttaaggcgtccagcgccccgagcggttcatcaagcaacaataatcccggtcgatgaatcaacgctcttgccagcgccactcgctgtttctgcccgccagaaagtgcggcaggccattcccctgcgcgattctccagtcctaccgcagccaacgctcgacgtgcggcatcgcgccactggcctttaaggcctaacccaacgttatcaatcacgcttttccacggtagcagacgcgcatcctgaaacatcattcgcgtgtcttcctgaatttcagccagcggtgtggtgcccgctaacacatcgcctgcggttggcgtttccagacctgccagcaggcgcagcagggtacttttgccaccaccgctgcggcccaccaccgccacaaactgacctgccggaatatgtaaatccagttggttcaggacgatattttccgcgtaatgtttgcttactgcattgagcaacaatggcgtgccctggttcagacgagcagtattcataccgtggcctccttcaaatgataagccgggttccagcgcaaccagaggcgctctaacagctgcgcgctgacgtcagccagtttgccgagcagggcgtaaagaataatagcgactaccaccacgtccgtttgcaaaaacccccgcgcattcatcgccagataaccaatgccactattggcagaaatggtttcggcaacaatcagcgtcagccacatcaggcccaacgcaaaacgcacgccgaccataatactgggcagggcaccaggcaggatcacatggataaacagcggtatgccggataatccatagctacgcgccatctccaccaacccgcgatcgatattacggatgccatgccaggtgttgatataaatggggaatagcgtaccgagcgccaccagaaagatttttgcggattcatcaatgccaaaccacaaaatcaccagcgggatcagcgccagatgcggcacgttgcgcaacatctgaatactggtatccagcagccgttctccccagcgagatagcccgctaatcagtcccaaaatcaaccccaggcttccgccaatactaaagccaatcagcgcccgccaggagctgatcgccagatgctgccacagttcgccgctggcggagagcgtccagaacgccgtcaccactccttccggactaggcaaaatacgcgtgctcagccagccaacgctggaggccagttgccacaccgccacgatgcccaccggtaaaaaccagggggcaacgcgcaataaccacttcttcactggcgttgccattatttcttccttagctttgcgcgactttacgggggataaaatcattcgccaccgcttcgccttgcggattcagcggctgcggctggggaatttccgggatggcgacatccagaagcgggaacagcaactcgccaacccgatacgcttcttccagatgcggatagccgctaagcacaaaactgtcgatgccaagcgcggcatattcgttgattcgcgcagcgaccgtaggaccatcgcccaccagcgccgtcccggcaccgccgcgcactaagccaacgcccgcccataaattggggctgatctccagattgtcgcgcttgccgttatgtaacgccgccattcgctgttgccctacggaatccgtccgggcgaatgcggcctgtgctttggcgatagtttcatcatcaagatggctgattaaccgctcggcggcctgccacgcttcgtcgttagtttcacgaacaatcacatgcagacgaataccgaaacgaattttgcgtccatgcgcggcagctttcgcccgcacttgttcgattttctctttaaccagttccggcggttcgccccaggtgaggtagagatcaacctgttctgccgccagctcctgggcgacatcactgcttccgccaaagtaaagtggcggatacggctgttgaatcgccgggaagagcagttttgctccgcgcacatgaatatgtttaccgttgaaatcgacggtttctctctgcaataaacgccgccagacctgggtaaattccgcgctggcttcgtagcgctcgctatgatcaaggaacactccgtcgcctgccagctcttgtggatcgctgcctgtgaccaggttaaacaacgcacgtccattactgagacggtcaagcgtggcggcctggcgggcggcaacggtaggactggttacgctgggacgcagggcgacaagaaacttcagccgctgcgtcaccgggatcatgcttgcggcaaccagccacgcatcttcgcaggagcgccccgttggaattagcacaccggtatagccaagacgatccgccgcttgcgcaatttgttgcagataaccgtgatcaaccgggcgactaccttcttccgttcccagataatgcccgtcaccgtgggtcggtaaaaaccagaacatattcagactcataattgttttccttccagttgagtgggctgccagatgcgctggcgaatatcgacttttttcggcaccagacgattttcataaaacagatctgccgtttgctgctgtaaggcggcaacctcggcgttaaccggtttgatggtggtaggagggcgatgatctaagtaagaggcaatcaccggtgccggtaagcccatcgtttttgccagtaaagcgatgctttgctcgcgctggctgcgggttaacgcatcggcctcactaaaggttgccagtacgccctgaataaaagcgccgtttttttctgcatagggacgagctgccagataaaagcttccagtttgattgagatcggtgccgtctttcagcacccgcacgccgccctgtaataatgcagcagagtagtagggatcccagatagcccaggcgtcaacgttaccttgctggaacgcggcgcgggcatcagcgggcgtcaggtaagtgggttggatatcggtaaacttaagtccggcctgacgcagtgcacgcagtaaaaggttgtgactactggaacctttctgaaaggcaactttgtgacctttaagatcggctacggttttgatcgggctgttttctgccaccagaatcacttcggctttgggcttcggtggctcgacgcccacgtacaccaaatcagccccggcagcctgggcaaagattggcggaatatccccggtactgccgagatcaatactgccaacgtttaacgcttccaacatttgcggacccgcggggaactccacccaggagattttactttccggatagcgtttttccagtaactggtggctttttgccagcaccataccaatactgcctttctgatagcctatacgtaacgcttcagggctggattctgcagcaaccgcaaaagtagagacgctaagcaatcccgccagcgccagtttaatgatgttacgcatgggcattacctcgcagagacagaaggtcaggaacctgaacatcgcggcggtgcaatgcctgccagaaagtttctagcgcggtatcaagacgggtttgcagatttggcgtgaactggggtctgtgatggtaatcaattacttgactgtcatcggcaaacacgccgtgcaggatctcctgagctttcagtgcgcttaaaactggtttaagggcataatcgaccgccagcagatgggccacggtaccgcccgtcgccagcggtagcaccactttgccttgcaaagcgcgttctggcagcaggtcgagcagggttttcaacgcaccggaataggcggctttatacacaggcgtggcgacaatcagcccatcggcctgttgcagctgttcggtgaaggtcttgagtgccggactatcgaaacgagcataaagtagatcttccggggcgaagttttgcagattccagtgataaacctctacatccaggccatttagtttttcccgcgcatattccagcaaggagctggagcgagaaggaaagcgaggactacccgccagggtgatgacacgcatactctctccttataaccaattgttctttttttgttaacattgataacaattcggtcagtctgtcggagagacaagaaaattccaaatataaattttgtgtatctttttctgaaaataaactaaagaaagggctttatatatcacgcatatttatttattggatagtcattagatgttgaatcaatgaattactcgttcagttaatatttaaatattcatgaaatctataaattaaagatttgtcacttattggatttagtatgcttgatttaaatggcggacaattattgttattattaagtctaatgtcatttaaaggcattatcatatttacgaagagatcaggatgataacgatgaaaaaaagtgtattgacggcgtttataactgtggtatgtgcaacgtccagcgttatggctgctgatgataatgctatcacggatggcagtgtaacatttaatggtaaagttattgctccagcttgtaccctggtagctgcgacgaaagattccgtggtgactttgccagatgttagtgccacgaagttgcaaaccaatggtcaggtttctggcgtgcaaattgatgtgccaattgaattaaaagattgtgatactaccgtaacaaaaaatgcaacgttcacctttaatggcactgcggatactactcagattacagcgtttgctaaccaggccagttctgatgctgctacaaacgtggccctgcaaatgtatatgaatgatggtacaacggccatcacgccagacacagaaaccgggaacattttgttgcaggatggagatcagacgttgacttttaaagttgattatatcgctacggggaaagcgactagtggtaatgtgaatgcggtaacaaatttccatattaactattattaatagaactcattaattgttttattaattagtacccctccagtgttctggaggggatattcatattttttaagagtgactatttatgaaaacttgcataacaaagggaattgtgaccgtaagtttaacggcaatattactcagctgcagttccgcatgggcggcaggtaaaggcgggattggacttgcagcaacacgtcttgtttatagtgaaggtgaagagcaaattagtctgggtgtacgtaacaccagtccggatgttccttatcttattcagagttgggtgatgaccccagataataaaaaaagtgcagactttattattacaccaccgctatttgtgctgaatccggcaaatgagaatctgttacgcattatgtacattggagcgccgttggcgaaagacagagaaacccttttcttcactagcgtacgggcagtccctagtacaacgaagcggaaagagggaaataccctgaagattgccacacaaagcgtcatcaaacttttctggcgaccaaaaggtttagcgtatcccttaggcgaggctccggcgaaactgcgttgcactagcagtgctgacatggttacggtcagtaacccaacaccttatttcattaccctgacagacctgaaaataggtggaaaagtagttaaaaatcaaatgatttccccctttgataaataccaattttctctgccaaagggggccaaaaatagcagcgtaacgtatcgaaccatcaatgactacggggcggaaacgccgcaactcaactgtaaaagctaagccgtcttcagttaagagagcgagatgtatagaactcatcgacaacacagcctgttaagctctggtggagtgccaagctttattggtgggctggtggtgtttgtgagcgcagcgttcaatgcacaagctgaaacctggttcgatcctgcttttttcaaagatgatcccagtatggtggccgatttgtctcgtttcgaaaaaggacaaaaaataacgccaggggtttatcgtgtcgatattgttctgaatcagacaattgtagatacgcgcaacgtcaattttgttgagataacgccagagaaggggattgccgcctgtttgacgactgaaagcctggatgcaatgggtgttaatactgatgcgtttccggcttttaaacaactggacaaacaagcgtgtgtgccattggcggagattattccggatgccagcgtaacgtttaatgtgaataaactccgtctggaaattagtgtaccgcaaatcgccatcaaaagtaatgcccgtggttatgtcccccctgaacgttgggatgaagggatcaacgcgctattactgggatatagctttagcggggctaacagtattcatagcagcgcagacagtgattctggcgacagctattttctgaatttaaacagtggcgttaatttaggcccatggagattgcgcaacaatagtacatggagtcgtagtagtggccaaaccgcagaatggaagaatctcagcagctatttgcaacgggcggttattcctctgaaaggcgaactgaccgtaggtgatgattatactgcaggcgattttttcgatagtgtcagctttcgtggtgtgcagctggcgagtgatgacaacatgctgccagacagcctgaaagggtttgcgcctgtggtgcgtggtatcgccaaaagcaatgcccagataacgattaagcaaaatggttacaccatttaccaaacttatgtaagccctggtgcttttgaaattagtgatctctattccacgagcagcagcggtgatttgttagttgaaatcaaagaagcggacggcagcgtcaatagctacagcgtaccgttctccagtgtgccattactccagcgtcaggggcgaatcaaatacgcggtgacactggcgaaatacagaaccaatagtaatgaacagcaggagagcaaatttgcccaggccacgttgcagtggggcggaccgtggggaacgacctggtatggtggtggacaatatgctgaatattaccgtgccgccatgtttggtctgggatttaacctcggcgatttcggagcaattagcttcgatgcgacccaggcgaagagtacgctagcagatcaaagcgaacataaaggtcagagttatcgttttctgtatgccaaaacgctcaaccacttgggcactaactttcaattgatgggctatcgctatagcacgagcggtttctacaccctttccgacaccatgtataaacatatggatggctacgaatttaatgacggtgatgatgaagatacgccgatgtggagccgttattacaatttgttttacaccaaacgtggcaaactgcaggtcaatatctcccagcaattaggcgagtacggtagcttttatttaagtggtagccagcaaacttactggcatacggatcaacaggatcggctattacagtttggctacaacacgcaaattaaagatcttagcctggggatttcctggaactacagtaagtcccgtggtcaacctgatgctgatcaggtgtttgctctaaatttttccctgccgctcaatctgttgctccccagaagtaatgatagctataccaggaaaaaaaattacgcctggatgacctctaacaccagtatcgataacgaagggcacactacacaaaacctgggtttaacggagacattactcgatgacggtaacctgagctacagcgtgcaacagggatataacagcgaggggaaaacggctaatggtagcgccagcatggattacaaaggggcgtttgcggatgcccgagtgggctacaactacagcgataacggcagtcaacaacaactgaactacgctcttagtggcagtttagttgcccatagtcagggcattaccctggggcaaagcctgggggaaactaacgttctgattgcagcaccaggcgcagagaatactcgtgtggcgaacagcaccgggctgaaaactgactggcgcggatataccgttgttccttatgccacttcttatcgggaaaatcgaatcgcacttgatgcggcgagcttaaaacgtaacgtggatcttgaaaatgcagtagtcaacgtggttcccaccaaaggggcgttggttctggcggagttcaatgcccatgcgggtgcaagggtattaatgaaaacaagtaagcagggtataccgctgcgttttggcgcgatagcgacgctggacggcgtacaggctaatagcggcataattgatgatgatggcagcctctatatggcgggtttaccggcgaagggaacaataagcgtgcgctggggcgaagctcccgatcaaatttgtcatatcaattacgagcttaccgaacaacaaattaactctgcgattacgcgaatggatgccatatgcagataatctttggagaaaaatgcgtgagtttactacgactattttttgccgccgtcttaatgttatggtgcgctcaaaccgctgcttatagcgggcagtgtcatactactcaggggaatccgtatattggcgtcaattttggcgttaaaaccctggaggaagaagcaaatacggcaggggtagttaaagacaaattttatcagtggaacgaaagcaatgattattatgtttcctgtgattgcgataaagacaatgtcagaagtggccgatgggcattcgccgcggatagtccgttagtctatttaggcgacaactggtacaaaattaatgactatcttgccgccaaagttttattgcaggttaaaggcagttctcctactgcggttcctttcgaaaacgtgggcacagggggggatacccgatggcatatttgcgaccctggcggtcaacgtttaggtgggcagggggcaagcggtaatagcggtagcttttccctgaaaatattgcagccgttcgttggcagcgtcgtcattcctcctatggcgctggcgcgattatatgaatgctacaacatacccgcaggtgattcctgcacgactacaggtacaccggttttagtgtattacctgtctggtacgatcaatagtcttggcagttgttccgtcaatgccggagagacaattgaagttgatttaggtgatgtcttcgctgccaatttccgtgttgtagggcataaacctcttggggccagaacggcagaacttgcaattccagtcaggtgtaacacgggaaacgcgggattagttaatgtcaacctgagtctgacggcaaccacagaccccagctatccccaggcgattaagacgagtcgtcctggcgtgggcgtggtggtgaccgatagccagaacaacattatttcccctgctggtggaacattaccgctctctattcctgatgatgcagacagtatcgcgcgaatgaatgtctatccagtcagcacgacaggtgtaccaccagaaaccgggcgatttgaagccacggcaacggtgagaataaattttgattaacgcgtgaacgtatgaagaaaaaaacgatatttcagtgcgttatcttgttctttagcattcttaacatccatgtcgggatggctgggcctgaacaagttagtatgcatatttatgggaatgtggtcgatcagggctgtgatgtcgccaccaaaagtgcattacaaaatattcatattggtgattttaatatcagtgattttcaggccgcgaataccgtaagcactgctgctgatttgaatatcgatatcaccggttgtgccgctggtattactggcgcggacgtcctttttagcggcgaggctgacacccttgcgccgacactgctcaaactaactgacacaggcggaagcggtggtatggcaacggggattgccgtgcaaattcttgatgcgcaaagtcagcaagaaatcccgctcaatcaggtccagcctcttacgcccttaaaagccggggataacacactcaaatatcaacttcgttataagtccacaaaggcgggagcaacgggcggtaatgcgacggcggttctctattttgatctggtttaccagtgaaggagtgatgttgaaacggataatctggattctgttcttattgggattaacgtggggctgtgagctatttgcccatgatggcacggtcaacattagcggaagctttcgccgtaatacatgcgtgctggcacaggatagcaagcaaatcaatgtgcagttaggcgatgtcagcctgacacgtttttctcatgggaattatggcccggagaaatctttcatcattaatttgcaggattgcggaacagatgtcagcacggttgacgtcacctttagtggaacccccgacggagtgcagagcgaaatgttgtccattgaaagtggtacggatgcagccagcgggctggcaattgcgattctggatgatgcgaagatattgattccgcttaaccaggcgagtaaagactacagcctacatagcggtaaggtgccattaactttttatgcgcaattgcgacctgtcaatagcgatgtgcagagcggtaaagtgaatgccagcgcgacatttgtacttcattatgactaatacgtggaacagattggcgctcttgattttcgccgttttaagcctgctggtggcgggtgaattgcaggcaggagtggtggtcggcggaacgcgatttatctttccggcagacagagaaagcatatctattttactgactaataccagtcaggaatcctggcttattaacagtaaaatcaaccgcccaacgcgttgggccgggggggaagcgagcacagtgccagcaccattactggccgctccgccacttattctcctgaagcccggtacgacaggcacgttgcgcttgctgagaacggaaagcgacatcttgcctgtggatcgcgaaacgctatttgagttaagcattgccagcgtgccatccggcaaagttgaaaatcagagcgtaaaagtggcgatgcgcagcgtatttaaactgttctggcgacccgaaggtttgccgggcgacccgctggaagcttatcaacaattacgctggacacggaatagccagggtgtacaactcactaacccaacgccttattacattaacctgattcaggtgagtgtaaatggtaaagcgttaagtaatgtgggagttgtgccgcctaaaagccagcgtcagacaagctggtgtcaggcaatcgcaccgtgtcatgtcgcctggcgggcgataaatgattacggcgggttgagtgcaaagaaggagcaaaatctgccctgaaacaggttcggaaaacgtttgcgttttttttgccgcaggtcaattcccttttggtccgaactcgcacataatacgcccccggtttgcacaccgggaatccaggagagttcatgtactaccccttcgttcgtaaagcccttttccagctcgatccagagcgcgctcatgagtttacttttcagcaattacgccgtattacaggaacgccgtttgaagcactggtgcggcagaaagtgcctgcgaaacctgttaactgcatgggcctgacgtttaaaaatccgcttggtctggcagccggtcttgataaagacggggagtgcattgacgcgttaggcgcgatgggatttggaagcatcgagatcggtaccgtcacgccacgtccacagccaggtaatgacaagccgcgtctctttcgtctggtagatgccgaaggtttgatcaaccgtatgggctttaataatcttggcgttgataacctcgtagagaacgtaaaaaaggcccattatgacggcgtcctgggtattaacatcggcaaaaataaagatacgccagtggagcagggcaaagatgactatctgatttgtatggaaaaaatctatgcctatgcgggatatatcgccatcaatattagtagcccgaataccccaggattacgcacgctgcaatatggtgaagcgctggatgatctcttaaccgcgattaaaaataagcaaaatgatttgcaagcgatgcaccataaatatgtgccgatcgcagtgaagatcgcgccggatctttctgaagaagaattgatccaggttgccgatagtttagttcgccataatattgatggcgttattgcaaccaataccacactcgatcgttctcttgttcagggaatgaaaaattgcgatcaaaccggtggcttaagtggtcgtccgcttcagttaaaaagcaccgaaattattcgccgcttgagtctggaattaaacggtcgcttaccgatcatcggtgttggcggcatcgacagcgttatcgctgcgcgtgaaaagattgctgcgggtgccagtctggtgcaaatttattctggttttatttttaaaggtccgccgctgattaaagaaatcgttacccatatctaattatttcttcgaattcctctttataagataatcagggctttattttcagccctggttgttttatattcatcgctgttgcttatttagacattttgtacttttattgttgaggttattaagcgaagcgacaatggattgtgttgctgcggttttatagggtaggggagaggcagatgcgaattaaaccagacgataactggcgttggtattacgatgaagagcacgatcgaatgatgctcgatttagccaatggtatgctatttcgcagtcgttttgcgcgcaagatgttgactccagatgccttttctcccgcaggcttttgcgttgacgacgccgcgctctatttctcttttgaagaaaagtgccgcgattttaatttatctaaagaacaaaaagccgaactggtgctgaatgcactggtagcaattcgctatctcaaaccgcaaatgccgaaaagctggcattttgtttcccatggtgaaatgtgggtgcccatgccgggcgatgcggcctgcgtttggttgagcgatactcacgagcaggtcaatttgctggtcgttgaatctggcgaaaatgccgcactatgcctgctggcacaaccctgcgttgttattgcgggtcgcgcgatgcagttgggcgacgccattaaaatcatgaacgacaggctgaaaccgcaggttaatgttgacagcttcagcctcgaacaggcagtttaacgcgccaacttaagtgcagtcttcggtacacagctacagcaaagaatggtgccatcatcgcccattgcactttttttcagcggcgtgacttcgccttctaaaagctgaacacggcaacttccacaaatgcccgcgcggcaagaataagggatacgaattccctgattttctaattgctccagcaacacctgttggttatttccacgaaatgcctgtccctgccagtcaatatctacatttgcgtccggttgttgcgtgatgttggcggtatcatcagcggcagctgcgccgtaaatttttgccggagccgttgccagaatttccacctcatcgccaacgcgaatcacgccgctattacgggcaattaaattctgaccaaaatcgacatcgccgttatcctgggcagtgcggaaagattgcaatgtttttaatggttcgcctgccggatgtttttgccctttttctgggctgacggtggtgaaaatacagcggctacaaggtttaaccacatcaaacaccacatcaccaatgcgaatcactttccagcgatcttcttcccaggcactcgcgccggaaaccaccagattggggcggaattgctccatttttacactggccggacaacgttgttggagatcacgtaagctggcttcgttagcaagaaggtaaggatagccatcagcaaaactcagaggtacagtgttgtggcgtttcacgcgccgggtcatttgtggccccacccagcgtaattgcacttcgcgggagaaaaatccacttagccatttgttgatcgcgtctggcgcaattcgcgcggtaaaatgtgtgccccaaacttcggttggtgcgtcttgtgtggcgaaatcagcaaaacgaacatatgcgctactgccatctggtgcggtgagatgcaagccatcatgcacaggactaggagtaaaccgtaccatctggggaaactggcgagcggtaataaacgtaccgtcaggttccgtgatcataaagatgcgatcgaaggccagaccactgacatctgccagagcatgtgtaagaccaatgccgcgcatgcttttaacaggatgaataaaaagccggattaatgtcgccacggtgcggtcctcaaatgaaaataagccctcaactttatgacatgacgcgcttattagctataatgcgcaacaattttcttagcgcctgtcccattaggctattttatttgtcagtttggccctgggttatgctcgaaatcctcacgtacttgtgtacgctccggtttctccgcgctgtccatgtccagactgactgcaacaattacgcctactgcggtaggctcttagagtaaaagtgacgatatgaattctctgtttgccagtacggcccgtgggctggaagagctgttaaaaactgaactggaaaacctgggggccgttgaatgccaggtggttcagggtggggtccatttcaagggcgacacacggcttgtttaccagagcctgatgtggagccgcctggccagccgtattatgttgccgctgggcgagtgtaaggtttacagcgatttagacctctatctcggtgttcaggcgatcaactggacagagatgtttaatcctggcgcgaccttcgctgtccacttcagtggtttgaatgacaccatccgcaacagtcagtacggcgcgatgaaagtgaaagacgcgatcgtcgatgctttcacgcggaaaaatctgccgcgtccaaatgttgatcgcgatgcgccggatatccgcgttaacgtctggctgcataaagaaaccgccagtatcgctcttgatctgagtggtgatggtttacatctgcgtggctatcgcgatcgtgctggtattgcgccgatcaaagaaaccctggcagccgctattgtgatgcgatccggctggcagccaggaacaccgctgctcgatccgatgtgtggttccggtacgttgctgattgaagcagcgatgctggcgaccgatcgcgcaccaggcttgcaccgtgggcgttggggctttagcggctgggcgcagcatgatgaagctatctggcaggaagtgaaagcggaagcgcaaactcgcgcccgtaaaggcctggctgagtatagctctcatttttacggtagcgacagcgacgcacgggtgattcaacgtgcacgcactaacgcccgtcttgcggggattggtgaactgatcacctttgaggtgaaagatgtcgcgcaactgaccaatccgctgccgaaagggccgtacggcacagtgttgagcaacccgccatacggggaacgtctggacagcgaaccggcgctgattgcgctgcatagcctgctgggtcggatcatgaaaaaccagtttggtggctggaatctctctttgtttagtgccagcccggatctgctaagctgcttgcagctgcgtgcagacaaacagtacaaggcgaaaaacggcccgctggactgcgtacagaaaaattaccacgttgccgaaagcactccagacagcaaaccggcgatggtagcggaagactacaccaaccgcctgcgtaagaacctcaaaaaattcgagaagtgggctcgccaggaagggattgaatgttaccgcctgtatgacgccgatctgccagaatataacgttgccgttgaccgttatgccgactgggtggtggtgcaggagtatgcgccgccaaaaactattgatgctcacaaagcgcgtcagcgtctgttcgatattatcgctgcaaccattagcgtactggggattgcgccaaacaaactggtgctgaaaacccgtgaacgccagaagggcaaaaaccaataccagaaactgggcgagaagggcgagtttcttgaagttaccgaatataacgctcacttgtgggtgaacctgacggattatctcgatactggtctgttcctcgatcaccgcatcgcccgtcgtatgctcggtcagatgagcaaaggcaaagatttcctcaacctgttctcttataccggcagcgccaccgtgcatgcgggattaggcggtgcacgcagcaccaccaccgtggatatgagccgtacttatctggaatgggcagaacgcaacctgcgtctgaatggcctgaccgggcgtgcgcatcgcctgattcaggccgattgcctggcgtggctgcgtgaggcaaatgaacagttcgatctgatctttatcgatccgccaaccttctctaacagtaaacgaatggaagatgcgtttgatgttcagcgcgatcatctggcgctgatgaaagatttgaaacgtctgctgcgtgcaggtgggacgatcatgttcagcaacaacaaacgtggcttccgtatggatctcgacggcctggcaaaactgggactgaaagcacaagaaattacgcaaaaaacgctctcccaggatttcgcccgtaaccgccagatccacaactgctggctgattaccgcagcctgaaaggaatagtaatgagtttaatcagtatgcatggcgcatggctgagcttcagcgacgcgccgcttctcgataacgcagaactgcatatcgaagataacgaacgtgtttgtctggtgggccgcaacggcgcaggcaaaagcacgttaatgaaaatcctcaaccgtgaacaagggctggatgacggtcgcattatttacgagcaagatttgattgtagcgcgtctgcaacaggatccgccgcgtaacgttgagggtagcgtttatgatttcgttgccgaaggcattgaagaacaagcggaatatctgaaacgctatcacgatattagccgcctggtgatgaacgacccgagcgagaaaaatctcaacgaactggcgaaggttcaggaacagctggatcaccacaacctgtggcagctggaaaaccgcatcaacgaagtgctggcgcaactggggttagatcctaacgttgcgctgagcagcctttccggcggctggttgcgtaaagcggcattaggacgcgcgctggtgagtaatccgcgcgtgctgttgcttgatgaaccgacaaaccacctggatattgaaaccatcgactggctggaagggtttttgaaaactttcaacgggacgattattttcatctcccacgaccgtagctttatccgcaatatggcgacgcgcattgttgatctcgatcgcggcaagctggtgacctatccagggaattacgaccagtacctgctggaaaaagaagaagccctgcgcgtggaagaattacaaaatgccgagttcgatcgcaaactggcgcaggaagaggtgtggatccgccaggggatcaaagcacgccgtacccgtaatgaaggccgcgtacgcgccctgaaagcgatgcgtcgcgaacgtggtgaacgtcgcgaagtgatgggtaccgcaaagatgcaggtggaagaggccagccgctccggtaaaatcgttttcgaaatggaagacgtttgctaccaggttaacggtaagcaactggtgaaagatttttctgcccaggttctacgtggcgacaaaattgccctgattggtccgaatgggtgcggcaaaaccacgctgctaaaactgatgctcggtcagcttcaagtggacagcgggcgtattcacgttggcaccaaactggaagtggcttatttcgatcagcaccgcgcggaactggatcccgataaaacggtgatggataaccttgccgaaggtaagcaagaggtgatggttaacggcaagccacgccacgtattgggctatttgcaggactttctgttccatccgaaacgggcgatgacgccggtacgtgcgctttctggcggtgagcggaaccgcttgctgctggcgcgtttgttcctcaaaccaagcaacttattgattcttgacgaaccgaccaacgatcttgatgtcgaaacgctggaactgctggaagaactgatcgacagctatcagggcacggtattgctggttagccacgatcgtcagtttgtcgataacaccgttacagaatgttggatcttcgaaggcggcggtaaaattggtcgttatgtcggcggttatcatgatgcccgtggtcagcaagagcagtatgtggcgctcaaacagcctgcggtgaaaaaaaccgaagaagccgccgcggcaaaagcagaaactgtaaaacgcagcagtagcaaactaagctataaattgcagcgcgaactggagcagctaccgcaattgctcgaagatctggaggcgaagctggaagccctacagacgcaagtggcggatgcttccttcttcagtcagccgcatgagcagacgcaaaaagtgcttgctgatatggctgctgcagagcaggagctggagcaagcctttgaacgctgggagtatcttgaagcgttaaaaaatggtggctgatcgcaaaatagtcgatttaaacagagacagctgacaacggtaaaattgcctgatgaactgggtttatcaggcatgaaaaccaacactttgttagtcatctgtaaaatagcgcatcattaaggagtaccaatgtgcgaacatcatcatgccgcgaagcacatcctgtgcagccagtgtgacatgctggtggcgttaccgcgccttgagcatggtcagaaagcggcatgtccccggtgtggcacaacgttaaccgtggcgtgggatgcccctcggcagcgtcccaccgcctatgcgttggctgcactgttcatgctgttgctgtccaacttgtttccttttgtgaatatgaacgttgcaggagttaccagtgaaattacattactggaaattcccggcgtgcttttttctgaggactacgccagcctcggcacctttttcctgttgtttgtgcaactggttcccgcgttttgtctgataaccattctgttactggtgaatcgcgcggaattaccggtccgtttaaaagagcaactggcacgggtgctttttcaactcaaaacctggggaatggcggagattttcctcgcgggtgtgctggtcagtttcgttaaactgatggcttacggcagcattggggtaggcagcagctttctcccctggtgtttattttgtgtcctgcaactgcgcgcttttcagtgcgttgatcgtcgctggttatgggacgacatcgccccgatgccagaactgcgccagccgctaaaaccaggcgtcacggggatacgtcaggggctgcgtagctgctcctgttgtacggcaatccttcctgctgatgaacccgtgtgcccgcgttgtagtaccaaagggtacgttcggcgtagaaacagcctgcagtggacactcgcgctgcttgtaacgtccatcatgctgtatcttccggctaatattttgcccatcatggtgacggatttattaggcagcaagatgccgagcacgattctcgctggggtcattctgttatggagcgaaggctcttatcccgtcgctgcggtgatctttctggccagtattatggtgccaacgttaaagatgatcgccatcgcgtggctgtgttgggatgccaaagggcatggcaagcgcgacagtgaaagaatgcatttgatttatgaagttgttgagtttgtaggccgctggagcatgattgacgttttcgttatcgcggtgctcagcgcgctggtgcgtatgggaggtttaatgagtatttatccggcaatgggtgcattaatgtttgctttagtcgtcataatgacaatgttttctgctatgacgtttgacccgcgtttgagctgggatcgtcaacctgaaagtgagcatgaggagtcctgacagtatggaatctaataatggggaagccaaaatccagaaagtgaagaactggtctcccgtgtggatatttcctatcgtcacggcgctcattggggcctgggttcttttttatcattacagccatcagggaccggaagtgaccctgatcaccgcgaatgcggaaggaattgaaggtggcaaaaccaccattaaaagccgtagcgttgacgtcggcgtggttgaaagcgccacactggctgatgatttgacgcacgttgaaatcaaagcgcggctgaattccggtatggaaaaattgctgcataaagacaccgtcttttgggtggtgaaaccgcagattggtcgcgaagggattagcggcctgggaacgctgctgtctggagtttatatcgaactgcagccaggcgcgaaaggcagcaaaatggataaatacgatttgctggacagcccaccgttggccccgcctgatgcgaaaggtatccgtgtgattctcgatagcaaaaaagccgggcagctcagcccaggagatccggtgctgttccgtggctatcgggtaggtagcgttgaaaccagcaccttcgatacacaaaaacgcaatatcagctatcaactgttcatcaatgcaccttatgaccgactggtgaccaacaatgttcgcttctggaaagatagtggcattgcggttgatctgacgagtgcagggatgcgtgtggagatgggcagtttgacaacgctgctgagtggcggtgtcagctttgatgtgccggaaggtctggatttagggcagccagtggcaccgaaaacagctttcgttttgtatgatgatcagaagagcattcaggatagcttgtacaccgatcacattgattatctgatgttctttaaagatagcgtacgcggtctgcaaccgggagctccggtagagttccggggtattcgcctgggtaccgtaagcaaagtgccattctttgcgccgaatatgcgtcagacatttaacgatgattaccgtattccggtactgattcgtatcgagccagagcggctgaaaatgcagcttggcgaaaatgcggatgttgttgagcaccttggcgaattgttgaaacgtggtttacgcggaagcctgaaaaccggaaacctggtcactggtgcactgtatgttgatctcgatttctatccaaatacgcctgcaataaccggtattcgtgaatttaatggttatcagattatcccgaccgttagcggcggcctggcgcaaatccagcaacgactgatggaagcgttggataagatcaacaaactgccattgaatccgatgattgaacaggcaaccagtacgctttctgaaagtcagcgcacaatgaaaaacctgcaaacgacgctggatagcatgaacaagatcctcgctagccagagcatgcagcagttgccgacggatatgcagagtacgttgcgtgaattgaatcgcagcatgcagggcttccagcctggctccgcagcctacaacaagatggtggcggatatgcagcgccttgatcaggtgttgcgagaactgcaaccggtgctgaaaacgttcaatgagaagagtaacgcgctggtatttgaagcgaaggacaaaaaagatccagagccgaagagggcgaaacaatgaaaaagtggctagtgacgattgcagcactgtggctggccggatgcagctccggcgaaattaataaaaactattaccagttacctgtggtgcagagcggtacacaaagtaccgccagccagggcaatcgtctgttatgggtagagcaggtcactgttcctgactatctggcggggaatggtgtggtttatcaaaccagtgatgtgaagtatgtgattgccaacaacaacttgtgggccagcccgttggatcaacagttgcgcaacaccctggttgccaacctgagtacgcaactgcccggctgggtggttgcctcccagcctctgggaagcgcccaggacacgctcaatgttaccgtaacggagtttaacggtcgctatgatggcaaggtcattgtcagtggtgagtggctgttgaaccaccagggacaactgatcaaacgtccgttccgtctggaaggagtgcaaactcaggatggttacgatgagatggttaaagtgctggccggtgtctggagtcaggaagccgcttctattgcacaagagataaagcgtctaccttaattataaagatttgtaaatataaccgtctccggtatgttgcctgaggcggtttttttgtctctaacgtgcggaaaaatttgttcctcttcacattttttgtacaaccgacatgcccgtgtagctcacaaatatgacagtggcgtgaattttgcgcattgacggcagttatgattcgcggtattgcttaactgtgattgcacatttagtaatcactgttttcttttccaccagaaaccagtatgagggaaacgaggcatgaagagacaaaaacgagatcgcctggaacgggcacatcaacgtggttatcaggccggcatcgccggacgcagtaaagaaatgtgtccctatcagacgctgaatcaaaggagtcaatggctgggaggctggcgagaagccatggcggacagggtagtaatggcctgattctgtctctttaaaaagaaacctccgcattgcggaggtttcgccttttgatactctgtctgattataatcagaaggcagacgtatcctggaacagaccgactttcaggtcgctggcggtatagatcagacgaccatcaaccagcacttcgccatccgccaggcccataatcagacgacggttaacaatgcgtttaaagtgaatacggtaggtcacttttttcgctgtcggcagtacctgaccagtgaatttcacttcgccaacgcccagcgcgcggcctttaccttcgccgcccagccagccgaggtagaaccctaccagctgccacattgcgtccaggcccaggcatcccggcataaccggatcgccaataaagtggcatccgaagaaccacagatccggattgatatccagttctgcttcaacataccctttgtcgaagttaccacccgtttcggtcattttgaccacacggtccatcatcagcatgttcggtgctggcaattgcgggcctttagcgccaaacagttcaccgcgaccagaggcaagaaggtcttcttttgtataggattcgcgtttatctaccatgttctctgtaagccttattttattgaagcacgcaggatagctaacacgtgtacgctgaacaagtccgatcagttcggaataaaccagttcagccaacgtaatggccatggaaaacggtgacgtccttcctgttggcttgcttgcgcgatacgttcctggatggtttgcatcagcgtcgtttggccttcgccatcccacaccagatttaataataacggcagtgcgtcagtcacatcgtctactgcccagatggtgaatttgccttcttctaccgctttcaccagttcactgtgaagacttaaatggcgaacgttagctgtggggataatgacaccttgtttcccggttaactcacgttgctggcaaatagcaaagaagccttcgattttctcatttaaaccaccgaccggctgggcgcgaccgaactgatcgacactacctgtgatagcgatactctgattcaccggcacatcggcgagggcgcttatcagggcgcagagttcagccatgctggcactatctccatcaacttcactgtaactctgctcaaatgtcaggcttgcactgaaggggatctgttgctcaagctgtagttcgctcatcaggaacgcttgcatgatcatcatccctttcgcatggatattgccgccaagctccgctttgcgttcgatgtcggtgaattcaccatcgccaatatgcacaacgcagctaatgcgagaaggttcgccaaaagcgcgtggatgacccggaaattcaatgacgctaagggcgttaatttgcccgatgcgttcgccttcggtttcaatcaggatttgctcctgaaggatctcatcctgcatacgttcagcgaggaaaccttcgcgccattcacgctgctgcagcattaagtttagctgctcgccggagaaggtgtcgccatcacacagggaggcgacctctttacactggcggaggatccactgcgggctaagcggaagtgtttcttgttcaccggtgtagcgtgctgcttcgcggataagtatcggccaggcatccgctcccggtgcaggtaagtgattatgtctggcggtaaatgtcacccagcgacaccactgggttacactctccgcatcgacaatctgcagagtatcttcaaattcgctataaatagcctgctcactaagctctggctccatctcctggaaatcagccaaactttcgcgttcgcctaccagaatgactttcagcttcaatggcatgctaggcacagagacggggagagggcggctctcatcaaacgcaacccagtcaaaacgctcgcggttaacgatatttttcagccgcatccacagcagaggttgcgccagcagtgtacgcaaagagataatgagaataccgccatttgcctgatgcaccagaccaggctgcagggtaatgtcgccattaaactggcgcaggcagccaaagagttgctccgcttctacccagtcggcagcgacaacttgcgttaaagtcgcaaaattatcatctgcactcactgcgtgacgtaagcggatggagtggccggaaacctcatagtgaccgcccaccagttggcctgcatcgctttgtagcgtacgcgcggcattggcaataagattcagatactcagactcttccggggccttcgccagcataaaagaggaggatgctcgcgtatgcagcaactgctccagcgcaaattgcagccgcggttgagtatcactgaataaaggatcgttttcgtcaatcaaatgtggctgagcaaatatttcctgatagctatcggtatcaggaaccaggtcacgccatgcaagtttcgtaatggtcaaagttgatgttttttagtctgttgtcaaagccgcgattataccgtaaccggcactacagcacacgtagaaagcaccgacaatactcctggcatgggcgttaaagctcacaggatggagattcttttcttcactggcctaaaaagctgatattctgtaaagagttacacggtaacattgagatcgctatgaaatatcaacaacttgaaaatcttgaaagcggttggaaatggaagtatctggttaagaagcatcgcgaaggggagttaatcacccgttacatagaagccagtgccgcccaggaagccgtcgatgtgttgctcagcctggaaaatgaacccgtgctggtaaatggctggattgacaagcatatgaatccggaactggtcaatcgcatgaagcaaaccattcgggcaagacgaaagcgccattttaatgcggaacaccagcatacgcgcaaaaaaaagcatcgatctggaatttattgtctggcaacgtctggctggtcttgcgcagcgtcgcggtaaaacgctttctgaaacgattgttcagctgattgaagatgcggaaaacaaagagaaatacgcgaataaaatgtcttctctgaagcaggatctgcaggcattgctgggtaaggaataactgacgaaagtcagttcaatttactaaaggcaaaaaaaaccccgcagcagcggggtttttctaccagacgagaacttaagcctgcggctgagttacaacgtctttgatacctttaacttcgatctctacgcgacgatccggagccaggcagtcgatcagtgcagcacgctgtttcacgttgtcacaggtgttgccagtaaccgggttggattcgcccataccacgtgcggagatcttgtctgccgggatacctttggagatcaggtaatcaacaacagactgagcacggcgctcggacagaccctggttgtaagcgtcagaaccgatgcggtcggtgtaacccagaacaactacggaaccgtctttcggatccaggttgctcagctggctgtacagctgatccagagcagcctgaccttccggtttcagggttgctttgttgaagttgaacagaacgtcagacttcagagtgaagtgcttggtctgtacttccggtgccggagctggagccggagcaactactggagctgcttcgccctgaccgaaacggtaggaaacacccaggctcagcatgccgttgtccggacgagtgccgatggtgtgtgcgtcaccgatgttgttggtccactggtattccagacgggtagcgatttcaggagtgatcgcgtactcaacaccgccagcgaagaccggagaaacgccggtgtcgtggtttttaccataaacgttggatttagtgtctgcacgccataccatgccacccagacgagtgtagatgtccaggtcgtcagtgattgggtaacccagtttagcggtcagttgaacgccctgagctttgtatgcaccgttttcaacgctgcctttgtacggcatacgacctaaccagtcgtaacccatttcaaagccaacatacgggttaacctggtaaccaccaaaagcaccagcgcccagttggttttcatgggtcgggccattgttgttgatgaaaccagtgtcatggtactgggaccagcccagtttagcaccagtgtaccaggtgttatctttcggagcggcctgcgctacggtagcgaaaccagccagtgccactgcaatcgcgatagctgtctttttcattttttgcgcctcgttatcatccaaaatacgccatgaatatctccaacgagataacacggttaaatccttcaccgggggatctgctcaatattaactctaccgatatcttcggcttatgccgagcacccctggcgatgtaaagtctacaacgtagttgaaaacttacaagtgtgaactccgtcaggcatatgaaaaaaaagtcttgtataaggtatgtttaatcttttttgtcagcgacaatttacagaagagaatcgcggaaaccgcttcagacaagcctccgcaaggaaaattagtcacgactgaaagcattggctgggcgacaaaaaaagttccaggattaatcctaaatttacttaatgatacaaattagagtgaatttttagcccggaaagttgtctcgtggcgtgagaggatgcgcttaccggacgcataataaaccccatagcgttaccttcatttgccgcatcaacaagttcagcatgctcttcttcagtcaaatcatctgccaaccaaccgatcaccacactgtaattgcccgtgcgtaaagcgcgaaccatactctccacagtgtggcaaggggagagctggctaatctgcattactttcgttaagggtagcccagatgcctgaacccattcccgactcagtttttgttgcggtgttaaccagagttgccagcggctttgctgaccgagttgctgtaacaatggcaacagtagaagttgcgtcatcatgggctgatcttcgcgatagacaacttcactgataagcccggctgtagtgttttccgtagagacacgcgcaattttacttgctgcggaactgaagctgctagaacgatgtgcatagccactagtgtacataatcaatccagcccctgtgagttactgtatggatgtacagtacatccagtgacaacaaagatcaaccctattttcggaaagagcctcgcaaattttgtcgttggtgacgggaaaacataaattaatcttgccccttaagaataagttgcctattttcgtagttaacggatccgttaatgtgaatcattcttttatgttatgattttaaaaggaattttatgaaaagcctctcctataagcggatctataaaagtcaagaatacctggcaacgttgggcacaattgaataccgaagtttgtttggcagttacagcctgaccgttgacgacacggtgtttgcgatggtttctgatggtgagttgtatcttcgggcttgtgagcaaagtgcacagtactgtgtaaaacatccgcctgtctggctgacatataaaaagtgtggccgatccgttaccctcaattactatcgggttgatgaaagtctatggcgaaatcaactgaagctggtgcgtctgagcaaatattctctcgatgcagcgctgaaagagaaaagcacgcgcaatacccgggaaagactgaaagatttgcccaatatgtcttttcatctggaagcgattctcggggaggtggggattaaggatgtacgggcgttacgtatacttggggcaaaaatgtgttggttgcgactgcggcagcaaaacagtctggtgacagaaaagattctgtttatgcttgaaggtgccattatcggcattcatgaagctgcgctcccggtggcacgccgccaggagcttgcagaatgggctgactctcttacgccgaaacaggagtttcctgcggaacttgagtaattacgcgctaacaggagtttcctgcggaacttgagtaatctggcgttgcagacgaccaatctcaggcagtaatgcaatcaataatccaacttgttgtacgaccagaggttctttgctgtctgcccgtggttcaagttgctgcatccgctgtttcaggctagctaatgcctcattgacgcgttcttcatcagcaggttgatgatgtaacgcgtcatcaacatagcaaactgcgtcatcaagaaacgccagaatttcaggattagttaactgctcccggtgagcaccgagggcactgatatagctggtaaacgtatggttaaggcacagcaaccgaaacgcggcttcgcgaatttgcggggtaacgttcggctcgctggacatattacttaccacgctcgccagctcagcatcacggttgtgtgcatcgcggcgggcaatacgatacgccagacggttatcacgcccctgatggtattgctccagtatggcatcgagataccgacagttggcctctgtggcacgttcgagcatgcgcggcagattgcgaaactgccagtcaggccagatgtagctcactgccgcccacgcaatggcacaaccaatcagcgtatcgattacgcgaggtaacgctacttcaaaaccttcacccagtaagttaaaacacagtagcaccaaaagtgtgatgaacatcgttgcatgagcgtattgcacgttacggaaggcaaaaaagagcacgccggtaataaccagcagcaccagctgcccttccagacttggcacaaaccacagcacaggaatgccaatggcgatacctaccagcgtaccaataatccttaacttcaggcggtggcgcgtggcgttatagtttggctggcagacaaacaaacttgtcagcaagatccaatacccgtgatgcattccggttatctgaatgatggcgtagccgaagcacaacaccaggctcattcttaccgcatgacggaagagggcggattccggcgtgaagtgacggctaagacgcagccagatatcactcaacccgtgcgggctgtcatcagcgagctcattttcgtcattattatggggtagtgcctgggcctgttcactttcaattgttgccagttgggcatcaatggcgcgtaaattgttcagcaaaaatcccagtgttttgagtaaatcggcgggtgcgccgttatcgcgcatccgctccagcgcagcatcaatatgcgtaaaagcgcgctcaaaatgcggatcatgttgataaggctgacgcaacaaaatacagcgactcagttgctggcacgcctggccctgcatgctcatcagccgctgaaaacggaacagcacgtcgctgtggcgaaaatgttcacgcaatgtttgatactgaatatgagaagagctggcacgctcgtgaatatcctgtgcgacaaagtaataatgcagcgtgcgacgcgttccccgttgaccacgatcgccacgtaagcgggtcagcaggctgagtttcgtctgattcaatgtcgccatcagcagaccgttggcgagagccaaatcgtacagcggtgcctggctttgatcttcaatatcaggatcaaacatgcggctcttgagctcaagataacgcgccagttgttcatagcaacgcgccaggttgtcctgcagcgggcggaccgggaacagcagatgaccaataagtgtcaggacgttgtaccagacggcaccggccagcagatacatcggctgctgataccagtgctcatacagacttgttcccaacatagtgtaaatggcgatcagcaatgcaccgaaggcaattgttgcatagcgttgacccagaccgccgagcaaaatgaagccgctggtagagagcgttaagccaatcgcaaatagccagggccagggaaacagcaattctacactggcgctggcgataaaaaagcagaacagcgtaatgatgaggttacgcaaacgtcccgccagtcggtcatcgagatcggtcagcgccgctgccaccatccccagcgttagcggaatcgtcagttttacatcacccagccaccacggaaacgctgtggttccacaaagcgcaataaaaatacgcgcgtaatacagccaggcgctgttccaggtatagcgtttgagcaaaggacttagcataaaggccatattagtggattattcaaaacgacgacgtgcattggcttcacgcgcagcttgcgctgtttctacgcttaccacgcgacgaccaaccggccatagtgcaatagcggcaattttaaagttcgcaatgccgacaggaatgccaatgatactaatacattgtgcgatgcccgttgcaatgtgcatcaggcataaccaccagccaaagaaaatcagccagaaaatattcaataccgtaccgccagtattcagcagcacatttttgccagccgggttcagttcatcgacatgaatagcttcattgccataaggcaccagagacagtttagtgatctcccagcaggatcgtgtcagcggtaaggtaaaaatcagcacaatactgaccagagtcgccaacagccagcccagagtggtggcaaatccgccaagcacaaagttcagaatgttcaaaacggtacgcataaaacctcgctttactgtggttttcagtaatgggcggcaattgtaacgtttttttgggctggagcacgttttctctgacggttacactgataagaaataatttcgtgtggatctacagagtcatggaactgaaagcgacaacgcttggaaaacgtctggcacagcacccttacgatcgggcggtgatcctcaatgccgggattaaagtctccggcgatcgccacgaataccttattcctttcaatcaattactggcgattcactgtaagcgcggtctggtatggggcgagctggaatttgtactgccggacgaaaaagtggtgcgtctgcacggcaccgaatggggcgagacgcagcgtttttaccatcatcttgatgctcactggcggcggtggagtggcgagatgagcgaaattgcgtctggtgttttacgccagcaactggatttgattgccacgcgcactggggaaaataaatggctgacgcgtgagcaaacctctggcgtgcagcaacaaatccgccaggctttgagcgcgttgccgttgccggttaaccgactggaagaattcgataactgccgtgaggcgtggcgtaaatgtcaggcctggttgaaagatattgaaagcgctcggttgcagcataaccaggcgtataccgaagccatgcttaccgagtatgcggattttttccgccaggtcgagtctagtccgctgaatccggcgcaggcccgggcagtcgttaatggcgagcattctctgttagtgctggcaggtgcaggaagcggaaaaacgagcgtgctggtggcccgtgcaggctggttgctggcgcgtggtgaagcgtcccctgagcaaattttattgctggcgtttggtcgcaaagccgctgaagagatggacgagcggattcgcgaacggctacataccgaagacattaccgcacgcacgtttcatgcgctggcgctgcatattattcagcagggcagcaaaaaagttccgatagtcagcaaactggaaaatgataccgctgcccgtcatgaactctttattgctgagtggcgcaagcaatgcagcgaaaagaaagcgcaggcgaagggctggcggcaatggctgacggaagaaatgcagtggagtgtgccagaaggtaacttctgggatgatgaaaaattacagcgtcgccttgcctctcgcctcgatcgctgggtaagtctgatgcggatgcacggtggtgcacaggcagaaatgattgccagtgcacccgaagagattcgcgatctgttcagtaaacgtatcaagttgatggccccgttattaaaagcctggaaaggtgcgctgaaggcagaaaacgctgtcgattttagcggccttattcatcaggcgattgtgattctggagaaaggtcgctttatcagcccgtggaagcatattctggttgatgaatttcaggatatcagcccgcagcgggcagcgttgttagcggcattacgcaagcaaaacagtcagacgacgttgttcgctgttggtgatgactggcaggcgatttaccgattcagcggtgcgcaaatgagcctcaccaccgctttccatgaaaactttggtgaaggcgaacgctgtgatttagacacgacttaccgttttaacagtcgtatcggtgaggtggcaaaccggtttattcagcagaacccaggccagctgaaaaagccgctaaacagcttaaccaatggagacaaaaaagccgtcacgttattggatgagagtcaacttgacgctttgctggataagctctctggttatgccaaaccggaagagcgcattctgatcctggcgcgttaccatcacatgaggcctgccagcctggaaaaagcggcaacacgctggccgaagttgcaaatcgactttatgaccattcatgccagcaaagggcaacaggcggattacgtcatcatcgttggcttgcaggagggaagtgatggttttccggctgcggcgcgggagagcattatggaagaggcgctactgccaccggttgaggatttcccggacgctgaagaacggcggttaatgtacgtggcgctgacccgggcacgccatcgggtatgggcactgtttaacaaagagaatccctctccctttgtggaaatactgaaaaatctggatgtgccggtggcgagaaaaccgtaagaaacaggtggcgtttgccacctgtgcaatattacttcagacggtccgcgagataacgctgataatcggggatcagaatatcgaccgcgtcgttgaaatgcgggctctggattatgaagtctgccgttgccacgttggtggcgaccggaatgttccataccgtcgccagacgcagcaaggctttcacgtcaggatcgtgcggcacggcatttagtggatcccagaagaaaatcaatacatcaattttcccttcactgatcaatgcgccaacctgctggtcaccccccattgggccactcaacatcgcgttgacgttcatgccggtcgcgcgggaaattaagttaccggtagtgcctgttgcatacagtacgtgttgttccagtaacggttgatgccgttccacccagctcatcagcatttgtttgcagtgatcgtgtgccaccagcgcaatatgtttccgcgcaggtaaagtgcgagtcgtcagttccataatgtacatccgtagttaactttcctacagattactgtaagcacttatcgctgcaagataaagaccgaaaaagcctgcgcacaggcacaaaaatctcaggaagatggttgtttttccgcccactgcaggaaagtatttcgcgtttgtgggtcagccagtttaaaccaatacttcagccgttgttctgtgagcacctgagactgcggtggaatagcatccagctcggaaacaccgctaagcagcgtactgtcatctgccatcatcgtggcaaattgcggtagactagcgcgtttcgcggatttgttatagcgttcaacctcgacctcataatcaatcgtttttgccgtactggtaatggcgagaatatccagctttaccggaatcggcgtcgcatcgccatccaacaattcaaggcgcggcgcggcatcaaaatggttagcttcccgctcattctccaggcgaggcaggcgaaaattgacctggttgatgagctgggtattaaaactgaccaccagcggtggggagatatacagccgttcttcactattggaaagatgaatcgtcttctcaacgcgaaacactaactgatgcggtccattatccagttcaatgctgtccgcaccgcgcagcagagagctggaaaccttcttgccgtcgagtaccagaagatcgacatcggtactaagccgcagcgtggtggcaaaaacggataccggcaaacataatgcaatcaaggtggtcacgatgccggttttcataggtagctcctgtcaaaagaccgcccgaataataatgtgtcaaaatttttctttaatcatacttactaacatatagacatatttcccgcttttgctctcattcattcgtattagctgcatggttggcatgtcggctttgtcgtacactttgttaaacagtctggaggaaataatgaaagaaaccgatattgcaggcattttaacgtccactcacaccattgcgctggtgggggcaagcgacaaacccgatcgtcccagctatcgcgtgatgaaatatctactcgaccaggggtatcacgtcattccggttagcccaaaagttgccggcaaaacgctgctgggccagaaggggtatggcacgctggcagacgttccggaaaaagtcgatatggtcgatgttttccgtaatagtgaagcggcgtggggcgtggcacaggaagctattgccattggcgcgaaaactctctggatgcaactgggggtgattaatgagcaagcggcagtactggcacgggatgccgggttaaatgtggtgatggatcgctgcccggctattgagatccctcgcctgggcctggccaaataaaaaatccccggaaggcaaaaaccttccggggatttgttcagggattagttacgcagacgcggggcctggagttgtttgcggatggtctgcgccagctcatccatggatggctgttcaggatgttcatcctgcaattcgctacttagctgggcttcagccaggtaggtatgaaccggtaggccgttatcgtcctccatcactacgtgataccacggagcggcgcgaagctcgtcattcaccgccagctcatcagggctcggttcagagaggctataaaccgggtcgatatccacgaccactccgagataacctaacagggaatggcggacctgctggccgataccgaatttgctggcaatcatagtcacctcccgggaaatctttacctttgatataagggtaaaattccacatttcaagttacatgacgcgacaggcaaaccctttcagatatagcccttccggataggtagcgatcaccggatgatcggctgcctgacggaactgctctataaattgtacatcacgaccggcatcaattgcggcatccgcgatgattttctgaaataaatcgctggtcatcagaccggaacaggagaaagtcaggagaataccgccttcattcagcagctgaatcgccagcatgttgatgtctttataaccacgacacgcgcccatcaactggcttttattctcaacaaacttcggcgggtccatcacgataacgtcaaatttttcaccgcgatcgcgataagtacgcagcaatttaaagacatcatcacggacaaactcagccttgctcagatccagtttgttcagctcaacgttctgccgtgcaatatccagcgcttcctgggaggtatcaacgctgacaacctggctgcaaccgcccatcagtgcgcttacggcgaaaccaccggtataggagaaacagttcagcacacgtttattttcaacgtagcggcgggtagccaggcggctatcacgctggtccaggtagtagcccgttttgtgtccgtgctgaatatccaccagcagtttcattccgtgttcttcaatcggcagcagggcaggtggcaactcgccggtgacggggccctgggtcagctccattccttcttttttacgtaccgcgacgtcgctgcgatcgtaaatgctacattccgggtacagcgtttgcagggcactaattaatgccgcgcgctgatattctgccccagcactcagcagttgcagcaccagaaaattaccgaaacgatcgatagtaatacccggcaggccatcagattctccggcgattaaacgatagctgtcgaggccatctttttgcgccagccagtcacgccatttttgtgcttgttgcaaacggcgggaaaaaaaagcaatgtcgatagactcagacgggtcaaacgtccagacgcgcgcccggatttggctagctgggctataagcgccgcgtgctaaccattttccctgatgatcaacaatatcgatggtttcaccgaggctggctttaccttccatgcgggcaacggccccggaaaagacccacggatggcgacgaagtaatgatttttcgcgccctttggctaacactaaacgtacactcataatttacttttctgtcgatgcaaagaaatgggcgtcattgtccggagttttccatggatttgcaacgcgtccattaaggataaggagagcagcaatgagcaaagtctgcataattgcctgggtttacgggcgagttcagggcgtaggatttcgctacaccacacagtacgaagcgaaaagactgggtttaaccgggtacgccaaaaatcttgacgatggcagcgtggaagtggttgcttgcggtgaagaagggcaggtggaaaaattaatgcagtggttaaagagtggcggcccgcgttctgcgcgtgtagaacgggtgctcagcgagccgcatcatcccagcggggaattaaccgattttcgtatccgttaaatacattttaccggttttggcaggccagcaattttggtggcttgcttagccggacctttcggaaacagtcggtataaatagcggctgttacctttttcttcgccaaatttattcgccatcgcttttaccagcatacgaatcgccggagaagtattgaattccagatagaaatcacgcacaaaacgcaccacttcccagtgttccggactcaggctaatcccttcgttctctgcaatcaccacagccagcggctcactccactggctgctttctttgagatagccttcggtatccgtttctatctctttaccttcgaagatcagcataattattactaccttaatcagactggcggcagtgtaacaaaaaacaaagccccgcataaagcgaggctatgaaagtgttagcgggtgagattaatcgcggctagcgaagcccagaatgctcagcaggctgacgaagatgttgtacaggctaacatacaggctaaccgtggcacgaatatagttcgtctcaccgccatgaatgatgttgctggtttcaaacaagatagcgccagaggagatcagaatgaagaccgcgctgatcgccagatgcagagcaggcagctgcaggaagatattcgcaaccataccaatcagcaccaccacaatacccgccatcagcataccgccgaggaagctcatatctttgcgggtggtcagcacatatgcagagcagcagaagaacactaacgccgttccgcccagtgccatagcgattacgtcacccattccggcagacagataggtgttcagaataggtccgaggatataacccagaaaaccggtaaaggcgaatgcggagataatcccggtcggcttattcgccgttttataggtcaggaacatcaaaccatacatacccaccagcgtcagaatcagacccggagatggcagcatcagcaccgtactggcagttgcggtaatcgcgctaaaggccagcgtcaggctcagcagaaaataggtattacgcagcaccttatgggtgctaagcagacttgtacggtcatgactagaactaacaatacgatccattgagtcactctctatgacagatgtaattaattaagcagcataatgataatgcgtaagggcacccagaagttttacccatctttacgcatttgatctggaacaggtttaacagcggattatcaggtcattaagcaaatataacgccctgagaatttcgacaggcaaaagaaaaaggggttagcatttagctaaccccttatcttattggaatgacgcgcactataaacatcccgatgcggcgtgtaaacccctaatttgtttgtttgcctgaaaaacagccaaaagtgcattgatagcgtgaaataacagcagattgatcatttcatcaccatgaattccttctcttttactcgtttagcaaccggctaaacatccccaccgcccggccaaaagaaaaataggtccatttttatcgctaaaagataaatccacacagtttgtattgttttgtgcaaaagtttcactacgctttattaacaatactttctggcgacgtgcgccagtgcagaaggatgagctttcgttttcagcatctcacgtgaagcgatggtttgccttgctacagggacgtcgcttgccgaccataagcgcccggtgtcctgccggtgtcgcaaggaggagagacgtgcgatatgaataacgaggaaacattttaccaggccatgcggcgtcagggcgttacccggcgcagctttctcaaatattgtagtctggctgccacgagcctgggattaggcgcgggaatggcaccaaagattgcctgggcgctggagaacaaaccgcgcattccggtggtatggatccacggtctggaatgcacctgctgtaccgaatcttttatccgctccgctcacccactggcgaaggacgtcatcctttccctgatttccctcgattacgacgatactttgatggctgccgccggaacccaggcggaagaagtctttgaagacatcatcacgcaatacaatggcaaatatatcctcgcagtagaaggtaatccgccgctgggcgagcaggggatgttctgtatcagcagcggtcgaccgtttattgagaaactcaaacgtgccgctgccggagccagcgcgattatcgcctggggaacctgcgcgtcctggggctgcgtgcaggccgcgcgacccaatccgacgcaggcaacgcctatcgacaaagtcatcaccgacaaacccattatcaaagtacctggctgcccgccgatcccggatgtgatgagcgccatcattacttacatggtgacctttgatcgcttgccagatgtcgacagaatgggccgtccgctgatgttctatggtcagcgaatccacgataaatgctatcgccgcgcccacttcgacgccggagagttcgtccagagttgggatgatgacgctgcccgcaaaggttactgcctgtacaaaatgggctgcaaagggcctaccacctataacgcctgttcctccacacgctggaatgatggcgtttctttcccaatccagtctggtcacggctgcctgggctgtgcggaaaatggtttctgggatcgcggtagcttctacagccgcgtggtcgatattccgcaaatgggtactcattccaccgccgataccgtcggtttaaccgcgcttggcgtggtggcagcggctgttggtgtgcacgcagtcgccagcgccgttgaccagcgcagacgtcataaccagcaacctacagaaaccgaacatcagccaggcaatgaggataaacaggcatgagcactcagtacgaaactcagggatacaccatcaataatgccggacgccgcctggtggtcgacccgattacgcgcatcgaaggccacatgcgctgcgaagtgaatattaacgatcagaatgtgatcaccaatgccgtctcctgcggcaccatgtttcgcgggctggagatcatcctacaagggcgcgacccgcgcgatgcgtgggcgttcgttgaacgtatctgcggcgtctgtactggcgtacacgccctggctagcgtttacgccatcgaagatgctatcggtattaaagtgccggacaacgccaatatcatccgcaacattatgctggcaacgctctggtgccacgatcatctggtgcacttctatcagcttgccgggatggactggatcgatgtgttagatgcgctgaaagccgacccgcggaaaacttccgaactggcgcaaagtctctcctcttggccgaaaagttcccctggctatttcttcgacgtacaaaaccgcctgaaaaaatttgttgaaggcgggcagttggggatcttccgcaatggctactgggggcacccgcagtacaaactgccgccagaagctaacctgatgggctttgcccactatctcgaagctctcgatttccagcgtgaaattgtcaaaatccacgcggtctttggcggtaaaaacccgcatccaaactggattgtcggcgggatgccttgcgccatcaacattgacgaaagcggcgcggtcggggcagtcaatatggaacgcctgaacctggtgcagagtattatcacccgcacggcggacttcattaacaacgtgatgatccccgacgccttagccatcggtcagttcaacaaaccgtggagcgaaatcggcactggtctttctgataaatgcgttctcagctacggcgcattcccggatattgccaacgactttggcgagaaaagtctgctgatgcctggcggcgcggtgattaacggcgacttcaacaatgtgctgccagtggatttggttgatccgcagcaggtgcaggagtttgtcgaccacgcctggtatcgatatcccaacgatcaggtcgggcgtcatccgttcgatggcatcaccgacccgtggtacaaccccggcgatgtcaaaggcagcgataccaacattcagcagctgaatgaacaggaacgctacagctggatcaaagcgccacgctggcgcggtaacgcgatggaagtggggccgctggcgcgcacgttaatcgcttatcacaaaggcgatgctgcgaccgttgagagcgtcgatcgcatgatgagcgcgttgaacctgccgctttccggtatccagagtacgttaggccgcattttgtgccgcgcgcacgaagcgcagtgggccgcaggtaagttgcagtatttcttcgacaagctgatgaccaacctgaaaaacggcaatctcgccactgcttccacggaaaaatgggaacctgcaacctggccgacagagtgccgtggtgtcggttttaccgaagcgccgcgcggggcgttaggccactgggccgccattcgcgatggcaagattgatctctaccagtgcgtggtgccgaccacctggaacgccagcccgcgcgatcccaaagggcagattggcgcttatgaagcggcgctgatgaacaccaaaatggcgatccccgagcaaccgctggagatcctgcgtactctgcacagctttgacccgtgcctcgcctgtagtacacacgtgctgggcgacgacggtagcgagctgatctccgtgcaggtgcgttaacagcgaaggagaatcatcatgcaacagaaaagcgacaacgttgtcagccactatgtctttgaagcgccagtgcgcatctggcactggttgacggtgttatgcatggcggtgttgatggtcaccggatactttatcggcaagccgctaccttccgtcagcggcgaggcgacgtatctgttctatatgggctacatcaggttaattcacttcagcgccgggatggtttttaccgtggttttgctgatgcggatctactgggcttttgttggcaatcgatactcccgcgagctgtttatcgtgccggtatggcgtaaaagctggtggcagggcgtgtggtatgaaatccgctggtatctgtttctggcaaaacgtccgagtgccgatataggccataatcccatcgcccaggcggcgatgttcggctatttcctgatgagcgtctttatgatcatcactggttttgcgctgtacagcgaacacagccagtacgctatttttgcgccgttccgttatgtggtggaatttttctactggacgggtggcaacagtatggacattcacagctggcatcggctggggatgtggctgattggcgcgtttgtgatcggtcatgtctacatggcgctgcgtgaagacatcatgtccgacgacacggtgatctccaccatggtcaacggctaccgtagccacaaatttggcaaaataagtaacaaggagcgtagttgagctaaataagtaacaaggagcgttcatgagcgagcaacgcgtggtggtcatggggctgggcaacctgctgtgggccgatgaaggcttcggcgtgcgggtggcggaacggctgtatgcccattaccactggcccgagtatgtggagattgtcgatggcggtactcagggactgaacttgctggggtatgtcgaaagcgccagccatctgttgattctcgatgccattgactacgggctggaacctggaacgctgcgaacctatgccggagaacgcattccggcttatctcagcgcgaagaaaatgagcctgcatcagaacagtttctccgaagtgttggcgctggcggatatccgcggacatctgccagcacatattgccctcgtcggtctgcaacccgcaatgctcgacgactacggcggtagcctgagcgaactggcacgggagcaactgcccgctgcggaacaggcggcgctggcgcagcttgctgcgtggggaattgtgccgcaaccggctaatgaaagccgctgtctcaattatgactgtctgagcatggaaaattacgaaggcgttcgcttgcgccagtaccggatgacacaggaggagcagggatgagcaacgacacgccatttgatgcgttgtggcaacgaatgctggcgcgcggctggacgccagtcagtgaatcccgtcttgacgactggcttacgcaagcgccagacggcgtggtgttattaagcagtgacccgaaacgcacgccagaggtcagcgataatccggtaatgattggcgaattactgcgcgagtttcccgactatacatggcaggtggcgattgctgaccttgagcagagcgaagccatcggcgatcgctttggcgtctttcgctttcctgccactttagtgtttaccggcggaaactatcgcggcgtgctgaatggtattcacccgtgggcggaactgataaacctgatgcgcgggcttgtcgaaccgcagcaggagcgtgccagttgatctaaccgcagcaggagcgtgcctcatgagcgaaacttttttccatctgctggggccaggaacgcaaccgaacgatgacagtttcagcatgaatccactgccgatcacctgtcaggtgaatgatgaaccgagtatggcggccctggagcaatgtgctcacagcccgcaggtgattgcgctgttaaacgagttacaacatcaactaagcgaacgccaaccgccgttgggcgaggtgctggcagtcgatctgttaaatctcaacgccgacgatcgtcactttatcaatacgcttctcggggaaggggaagtgagtgtgcgcattcagcaggctgacgacagtgaaagtgaaatacaggaggcgatcttctgcggattatggcgggtgcgcagacgtcgcggcgaaaagttgctggaggacaaactggaggctggctgcgcgccgctggcgttgtggcaggcggcaacgcaaaatctcttgccgacagatagcctgttaccgccgcccattgatggcctgatgaatggcctaccgttggcgcatgagttactggcacatgtacgtaaccccgacgcgcagccgcacagcattaatctgacgcaattacccatcagcgaggctgatcggctttttctcagtcgtctctgtgggccgggaaatattcagattcgtaccattggctatggcgagagctatatcaacgccacggggttacgccatgtctggcatttacgctgtacggacaccttaaaaggcccgttactggaaagttatgaaatctgcccaataccggaagtggtgctggcagcgccagaagatttggtcgactctgcgcagcggcttagcgaggtatgtcagtggctggcggaagctgcaccgacgtaaaaagacggtaagtatcgctttcagtcttatgaatatcgcaatcggcgaatacctctggtcgtagagtttcaggataaagagggagatctaccattatcgggttatttttctctcttcgcctacaggagtgcgcatgtgggatgtcattgatttaagccgctggcagtttgctctgaccgcgctgtatcactttttatttgtaccccttaccctggggctgattttttttgctggctattatggaaaccatttacgtggtcaccggcaaaacaatctaccgcgatatgacgcgcttctggggtaagctcttcggtatcaattttgctcttggcgtggctaccggcctgaccatggagtttcagtttggtactaactggagtttctattccaactatgtgggcgatatttttggcgcaccgctggcgatggaagcattaatggccttcttcctcgaatccacctttgtcgggctgttcttcttcggctggcaacggctgaataaataccagcacctgctggtgacgtggctggtggcgttcggtagtaatctctctgcgttgtggatattgaatgccaacggttggatgcaatacccgaccggtgcgcattttgatatcgacaccctgcgtatggagatgaccagcttcagcgagctggtctttaatccggtcagccaggtgaaatttgtgcacaccgtaatggcgggctacgtgaccggggccatgtttattatggcgatcagcgcctggtatttactgcgcggacgggagcgcaatgtcgcattacgcagctttgccatcggttccgtcttcggtactctggcgattatcggtaccctgcaactcggagacagttctgcgtatgaagtcgcgcaagtacaaccggtaaaactggcggcgatggaaggggagtggcaaacggaacctgcacctgcaccgttccatgtggttgcctggccggaacaggatcaagagcgtaacgcctttgccctcaaaattcccgcgctgctagggatcctcgccactcacagtttagataaacccgtgccgggtctgaagaatttgatggctgaaacctacccacgcttgcaacgcggacgtatggcctggctgttaatgcaggaaataagccaaggcaatcgtgagccgcatgtgttgcaggcattccggggactggaaggtgacctgggctacggcatgttgctctcccgctatgcgccggatatgaatcatgtcacagccgcacagtaccaggcggcgatgcgtggcgcgatacctcaggttgcgccggtattctggagtttccgcatcatggtgggctgtggttccctgctgctactggtgatgctgattgcgcttgtccagacgctgcgtggcaaaatcgaccagcatcgctgggtgctgaaaatggcgctctggagtttgccgttgccgtggattgcgattgaagccgggtggtttatgaccgagtttggtcgtcagccgtgggcgatacaggacatcttaccgacatactccgcgcactccgctttaaccacaggacaactggctttcagtctgatcatgatcgtagggctttacaccctgttcttaatcgccgaagtctacctgatgcagaaatatgcccgtctggggccgagcgcgatgcagagtgaacaaccgacgcagcaacaggggtaaaggagaaaatcatgtttgattatgaaacattgcgcttcatctggtggctgctgattggcgtgatcctggtggtctttatgatctccgacggatttgacatggggatcggctgtctgctgccgctggtggcgcgtaatgatgatgaacgccggatagtgataaacagcgttggtgcacactgggaaggcaaccaggtctggttgatcctcgctggtggggcattatttgccgcctggcccagagtgtatgcagcggcgttttccggcttttatgtggcgatgatcctggtgctgtgcagtctgttcttccgcccgctggcctttgattatcgcggaaaaatcgccgatgcacgctggcgtaaaatgtgggacgccggtctggtcatcggcagtctggtgccgccggtagtcttcggtatcgccttcggcaacttgttgctcggcgtgccgtttgccttcacaccgcaattacgcgtggagtatctcggcagcttctggcaactgctgacgccattccctttattgtgcggattgctcagccttgggatggtgattttgcaaggtggcgtctggttacaactgaaaactgttggtgtgattcatctgcgtagtcagctggcgaccaaacgcgctgcactgttggtgatgctgtgctttttgctggcgggttactggctgtgggtcggtattgatggctttgtactgctcgcccaggatgctaacggtccttccaatccgttaatgaaactggtggcagtgctacctggtgcctggatgaataattttgtcgagagccccgttttgtggatcttcccgctgctgggattcttctgcccattgctgacggtgatggcgatttatcgtggtcgcccgggttggggatttttgatggcaagtttgatgcaatttggcgtgattttcacggcaggcatcacgctgttcccctttgtcatgccgagtagcgtgagtccgatctccagcctgacgttgtgggacagtacttccagtcagctgacgctgagcattatgttggtaatcgtgctgatatttttgcccattgtgttgctctacactctctggagctactacaaaatgtgggggcgcatgacaacagaaactctccgccgtaacgaaaacgagttgtactaaggagcagaaacaatgtggtatttactttggttcgtcggcattttgttgatgtgttcgctctccacccttgtgttggtatggctggacccgcgtctgaaaagttaacgaacgtaggcctgatgcggcgcattagcatcgcatcaggcaatcaataatgtcagatatgaaaagcggaaacatatcgatgaaagcgatcttaatcccatttttatctcttctgattccgttaaccccgcaatctgcattcgctcagagtgagccggagctgaagctggaaagtgtggtgattgtcagtcgtcatggtgtgcgtgctccaaccaaggccacgcaactgatgcaggatgtcaccccagacgcatggccaacctggccggtaaaactgggttggctgacaccgcgcggtggtgagctaatcgcctatctcggacattaccaacgccagcgtctggtagccgacggattgctggcgaaaaagggctgcccgcagtctggtcaggtcgcgattattgctgatgtcgacgagcgtacccgtaaaacaggcgaagccttcgccgccgggctggcacctgactgtgcaataaccgtacatacccaggcagatacgtccagtcccgatccgttatttaatcctctaaaaactggcgtttgccaactggataacgcgaacgtgactgacgcgatcctcagcagggcaggagggagtattgctgactttaccgggcatcggcaaacggcgtttcgcgaactggaacgggtgcttaattttccgcaaagtaacttgtgccttaaacgtgagaaacaggacgaaagctgtagtttaacgcaggcattaccaagcgaactcaaggtgagcgccgacaatgtcagtttaaccggtgcggtaagcctcgcaagtatgctgacggagatatttctcctgcaacaagcacagggaatgccggagccggggtggggaaggatcaccgatagtcaccagtggaacaccttgctaagtttgcataacgcgcaattttatttgctacaacgcacgccagaggttgcccgcagccgcgccaccccgttattagatttgatcaagacagcgttgacgccccatccaccgcaaaaacaggcgtatggtgtgacattacccactagtgtgctgtttatcgccggacacgatactaatctggcaaatctcggcggcgcactggagctcaactggacgcttcccggtcagccggataacacgccgccaggtggtgaactggtgtttgaacgctggcgtcggctaagcgataacagccagtggattcaggttagcctggtcttccagactttacagcagatgcgtgataaaacgccgctgagtttaaatacgccgcccggagaggtgaaactgaccctggcaggatgtgaagagcgaaatgcgcagggcatgtgtagcttggcaggttttacgcaaatcgtgaatgaagcacgcataccggcgtgcagtttgtaatgcataaaaaagagcattcagttacctgaatgctctgaggctgatgacaaacgaagaactgtctaatgcgtagaccggaaaaggcgttcacgccgcatccggccactttcagtttgcaatacgtacgcttgagatcaggattgtctactttgagtataacatccttgtgaaatctccctttcctcataccgcttgcactatatactgcgggtaggaaaggcgcgcagagggaaatataagattgttaactatccccctctggaaatacgacttgtgagcataagataaatcttagcaaaatacaaattaaagataaggaaattgttacgaaagctattaattattgttggtaatatagtttcaagtggtactataactggctgttaaatggcatttataactattaggtgcagagatattcgcttaaatggattagtttctttgtggaaaagtaactgatgttataatgtatgatgttgactatttcactattccaataaaaccagtcagctttaaacaagcagcgtcatattaagagagataaacatttgccgctgttggtcctcgcaggccatttacgcggcaaaattccacacgtaatcctggtataagcacttctgcgtcgcggggagtgaatgcggaaatatggacctgaacttctttacgaccgtcggaggggataatgaatcctttgccgcttttgcgatcaaaggttttgacaattcctgtcattttacgggacaaacaaattccttactgaaaatactgcgctgcactatacggggttaataaaataaagccagcgatatttaagaccgccggacggctaaaataaaatttgcttaatctcaattatcatgcgttaatagctgcgtcggtttgaaagacagacagcatacaaagtagtttactaaagcagttctcattatcaggcattatccccttcttttgagtctctctcctgaacactaagtagtttctgtattaaagccctgtttgccgaaaggcccaaaatgaaggaagtaaaatatgtctaataaaatgactggtttagtaaaatggtttaacgcagataaaggttttggctttatcactcctgatgatggcagcaaagacgttttcgtccatttcaccgccatccagagcaatgaattccgcacgctgaacgaaaatcagaaagttgaattttctattgagcaggggcaacgtggccccgcggcagcgaacgttgttacgctctaaggttgccattattactcaacatctccatttccgctgtccatgttgtcatggttcacagtaccgcacatcggcattcgatgtgacggagcgaaaccctttgggcgctaagtgtattttttgtaaatcgacgatgatcacctttgataacgtcgcgctgcaaatacgcactgaccatgcgccgctggattagtcaaaataatatcaggctccctcgtggagccttttttatatctgccttatttttcttcaacgctgtatgtatagtaagcgataacctgttgattattgaatctttcggggagatggcttataacatttcttacctgaccagggtaccgggaaccaacaccttactggcgtgttgctgtcttttaagaccagaagaggttaacagtgaatattgaagagttaaaaaaacaagccgaaacggaaatcgccgactttatcgcgcaaaaaatcgccgagctgaacaagaatacagggaaagaagtctctgaaattcgcttcaccgcacgagaaaaaatgaccgggcttgaaagttatgatgtcaaaatcaaaataatgtgattttgtgaacatcaccccgtgcgaggtgatgttccgcttgttgctaatttagtgaccaatcattggcgcttgtggaattaagcgtcggtacaattcctccggcaccgggctttgccatactcccgcatacattgcgtaaccaatcaccgcaaacataatccccagaaccagtagcgtcattaaccagccagacaacgcaaaggcttttttatttgccgcaggtttttgcagactaaaggtcaatgtactggctaccggacaactctctacgcaagtcatacagccggtacattccactgttcgtacctgaattaatttatcgaccgggatccgacttgggcaattttttgcgcatttgccacagtcgatacaactttcggcattgcgacgaatcttaaacgggctcaataggctaaccacgcccatcagcgcgccatatgggcaaagataacgacaccaggcatggcgaataaacaggctggcaatcagcaaaacggtcacgctgattaatgtcgcggtccccatatgacgaaagaaatcgagcattttaacgtccatcaccacgctgtaggggctcaacataaaatagtgaatcgcctgagcgggcatcaataacgcgatatagataaaaaaactcaacagcaaatacttcacgccgcgcagaggaatatccagccagcggggaaggacacattgccgaccaaacagtttgttaccgagatcgccgattaattcagaaagcgtaccaaccgggcataaccaactgcaaaaggcctttttgagtaatagactgatgacgataaaagcgaccaataacagcatcgcggcggcgtggacggacggtaactgacctgttacaaggctatatttcagattcatcagcccggcaatcggtagccagccttcgatacctcccggtctggcgacaaatgtcgtgctacttgccgtttcgtaatagcgcacccaataccagaacgtgatggcaatataaatattcattgccaacagtaataattgcgtcgctttacgccaggtcgtggcattacgccagtcattccacggtaatttgccgcccgtcgtgcctggccgccgctgccagcgggttcttttattctctgccatgattttgccagtccgttaagttgtataccaaatgccactattctagttgttcttaactggctgatattgattcaaatcgcgttcaggtctttcttatgcaaccatgcttccagagcggcaacactgcgtgtaatttcttcgtgtggaaggggggcagataatggctgctgctccagttgtgcgcatagctggctggcgatatgcattcccagactgctgcaactgctttttagctgatgcgcggcacgctttattttctcgctatcctgactggcgcgggcaatgtcgatttcatcgagaagcggcagggcatgttgtgtaaataataccagccattcgtggatcttctccgtccccattaactgagcatcttcattgagttggcttacatccaggctttgatcattattgacttgcagttggagatagtgcgccagtaactgaccgagcacttcacgcggcaccggtttagggataatcccgcggaataaactactggtacgctggcgcagcgtttcgtcaatgacatgggcgctaaagccaatcaaaaccaggctcggatattgctgtgccagttgtcgggcaagcgtaatgccgtcgatatccggcagatcaaaatccaccagtgcggcagcaaacggttcgctattttgcagtgtctctaaagcctgcgcggcattgccaacagcaacaatctgcgcaccactggttttcagcatctcaatggtaattcgctgggttagcgggttatcttcaattaacagcaaacgtaaaccgtcaagacgcaccgcctgattgactgtttttggcacgggtgccgtggcaacacgtaacggcaagcgtaaacaaaaacagcttccaacctccggcgtgctggtggcgctcagttcgccgcccatcgcctgggccagacggctactgatagtcagtcccagcccggtgccgccgcgtttgccgcttacctgcacaaatggctggaagatttctgccagtttcgcgggatcaataccgcagccgctgtcttccacttcgaccagccattgctcgccatcagtgcgactacgcaggataatgtacccttcgtcagtaaaacgcagggcgttgctcaacaggttggttataacctgacgaatacgtcgtggatcgcccattaacgcgcacggcatatcatcggcaattgccgttgccaggcgaatcgggcgacctttcacccgtccgctcattaattgcagggtactttccagcagcgggcgcggttcaaagggctcatcgctgacgctaacattcttgccacctgcttcgatagcggaataatcgagaatatcgttgaggatggtcagcaagctttcaccagagtcagtaattgcccgcaaatcatcacgctgggcgttaagtgcggggttatctgccagcagttgagcagtgccgagaataccgtacagcggtgtgcggatctcatggctcatcgccgccagaaacgcgctttttgcctggctggctttttctgcttccgcccgtgcctgtcggtgttctatcaccagttcctgcaattcagctgtacgcgctttgacctgcgccgccagctgttcgcggtggcgattcagtgcatgaacattgctgcgaaacgcatccatcagccgcccgatggtatccagctcccgtacgccagcggtttccgggaaaggggagtcaatatcaccgtccagcagccgttgcagcgcctgcgtttgttcggcaagtggacgcgtgacactgcgataaaccacgcgccagaggatcagaatcagtgcgcaaagactaaccatccccagcaataacaggctgtattgcccgcgtgcactcgctttttccagatgcgccagtccgtgctgattacgcagctcaatggtgtcgaccagctgactgacttcgctactaaactgcgcgaactgggcgatgttattttgtgcgagagtttgtaggtgattgctgatttcactgtcctgctgatacagcgccagcaaatcgctatattggctaacggtagttaacgttgttgcgacctgcgcacgaacacccggatcttcaatgcgtatttgccgacgttgcagaattttcaccgcattattgagctgcttttccagcgttggtgcatttttctggatctgctccagccccagattcatcaccatttgctgcacccgcagagcgctaaggcgcagttcattcatctggttaacatactcaagatcgatatcaatcagccgatcgagtgcactttcagcagcctgacgctgatcttgttcgatcaaatcgtaaatcccggcctgggtcgctccagcggaagttgtcgcattattcgcctgaccttgcgccaggcgtgcgatctcatcggcggcagcgactatctgctgactgagttgctgttgttgctggcgcagttgcaaacgctgccccaccagttccccttgctgacgtaagctacgggagatctcctgctcctgttgttcaatagcggtggtatcaaaaccttgttcccgtaacgcttgcagcaacgcattaatcttcaggctttgtgcggtgagcattcgcccctgcgcctgccacatcttttcgttatcggcactggtcaggttctgcgcggcgaaaagttcccaggcgctggcttcgctcaactggcgcgccatattcatggtaggaatcaatgcctgagtgttgtctttttccacctggctgataaagcgcaggttgtaccatcccaccagggtactggtcagggttaacagcgccatcagggcaaagcccatccagagtcttcgggtcagggttaaattcacggtcggtgcactttaggtgaaaaaggttgagtcgcaaagcggaatgcatctagcataaagccttattattgatgaggctatcatgcgcgtactgctatttttacttctttcccttttcatgttgccggcatttagcgctgataacctgttgcgctggcatgatgcgcagcatttcacggtgcaagcctctacgccgcttaaagccaaacgcgcatggaaactgtgcgcgctttatcccagcctgaaagatagttattggttaagcttgaactatggtatgcaggaggctgctcgccgctacggtgtggatttaaaagtgctggaggcaggcggctacagccagttggctacccagcaagcacaaatcgaccagtgtaaacagtggggcgcagaggccattttgctcggtagtagcacgaccagttttcccgacctgcaaaagcaggtagcaagtctgccggtgatcgaactggtaaatgctattgatgctccccaggtgaaaagccgcgttggtgtgccctggtttcagatgggctatcaaccggggcgatatctggtgcaatgggcgcacggtaaaccactgaatgtgctgttgatgcccggacccgataacgccgggggcagtaaggagatggtcgagggttttcgcgcagccattgccggaagcccggtgcgtattgttgatattgcgcttggtgataacgatattgaaatccagcgtaacctgttgcaggagatgctggaacgccatccagaaatcgacgtcgttgccggaacggccattgcggcagaggcggcaatgggggaagggcgtaacctgaaaacgccgcttaccgtggtgagcttttatcttagtcatcaggtgtatcgcgggctgaagcggggaagagtgattatggctgccagcgatcaaatggtctggcagggggaactggcggttgagcaggccatcaggcaattacaggggcaaagcgtttctgataatgtcagcccaccgattttagttctgacgccgaaaaatgccgaccgtgaacatattcgccgcagcctgagtccagggggatttcgtccggtctatttttatcagcacacaagtgcggctaagaaataatcagcacacatcagcggctaagaaataaccttcaccatgttgcgtcaccagtaaatccgcgctgagtttatgacgtaaacgacgaattaacacatcgacggtgcgcaggtcagggttttccacccgacgcgcagaaagcatacgtagcagacgttcacggctgagaatttcgcccggattcgtcacaaatgccaccaacatttcatactctgcgcgggtcagtttaatcggctcgccatcccgctccagcgtatggcggctcacattcaggcaataaccggcaaagcgatagcagttgtcctgagtgtgcggttgagcttgtcgcgcgaggtcgattcgccagagcagatttttcacccgtactaccagttcgcgcagttccagcggtttggtgacgtaatcgtctgcgcccatttccagcccaacaatacggtcaatccgatcgctgcgtccggtaaccagaataatccccaccgtactgcgttctcgcagggcgcgggttaacatcaggccattttcatcgggtaagttgatatccagcagaattaaatctacgctctgattctgcataatttcccgtagcccagcaccgctcgccgtaacggaaacggtatacccctcctgagtgaagtaggattgtaatcgcgcctgggtaaccggctcatcttcaacaataacaatgtgatgtggcatcagagggttttactcattctgttcatatctgttcatattctgccgtaagccgttcatcctgaccagtgccgctgttcatatttgctcattaagatcgcttcactaaaccataattctacaggggttattatgcggaaactctggaacgcgctacgccgacccagtgctcgttggagcgtactggcgctggtcgcaattgggattgtgattggcattgcgctgattgtattgccacacgttgggatcaaagtcaccagcacaaccgaattttgtgtcagttgccacagtatgcaaccggtgtatgaagaatataaacagagcgtgcatttccagaacgcctccggcgtgcgagctgaatgccatgactgtcatatcccgccggatattccaggcatggtgaagcgcaaactggaagcgagcaatgatatctaccagacctttattgctcactccattgatacacctgaaaaattcgaagccaaacgcgcggaacttgccgagcgtgaatgggcgcgaatgaaagaaaacaacagcgcaacctgccgctcctgccataactacgatgcgatggatcatgcgaagcagcatcctgaagcagcacgtcagatgaaggtggcagcgaaagataatcaatcctgcatcgactgtcataaaggtattgcccaccagttaccggatatgagtagcggcttccgtaagcagttcgatgagctgcgcgccagtgctaatgacagtggtgacacgctgtactctattgatattaagccaatttatgcggcgaaaggcgataaagaagcctctggttctctgctgcctgctagcgaagtgaaagtccttaaacgtgacggcgactggctgcaaattgaaattaccggctggacggaaagcgccggacgtcagcgtgtactcacccaattcccaggtaaacgcatctttgttgccagcattcgtggtgatgtgcagcagcaggtaaaaacgctggagaaaaccaccgttgccgacaccaataccgagtggagcaagttgcaggccactgcgtggatgaagaaaggcgacatggtgaacgatatcaaaccgatctgggcttatgcggatagcttgtacaacggcacctgtaaccagtgccacggcgcaccggaaatcgcccactttgacgctaacggttggatcggcacgctcaacggcatgattggctttaccagtctcgataaacgtgaagaacgcaccttgttgaaatatctgcaaatgaatgcgtctgacaccgcaggtaaggctcacggcgataagaaggaagaaaaataatgaacaataacgatctctttcaggcaagtcgtcggcgttttctggcacaactcggcggcttaaccgtcgccgggatgctggggccgagtttgttaacgccgcgacgtgcgactgcggcgcaagcggcgactgacgctgtcatcagcaaagagggcattcttaccgggagccactggggggctatccgcgcgacggtgaaggatggtcgctttgtggcggcaaaaccgttcgaactggataaatatccgagcaaaatgattgccggattgccggatcacgtacacaacgcggcgcgtattcgttatccgatggtacgcgtggactggctgcgtaagcgccatctcagcgatacctcccagcgcggtgataaccgttttgtgcgcgtgagctgggatgaagccctcgacatgttctatgaagaactggaacgcgtgcagaaaactcacgggccgagtgccttgctgaccgccagtggttggcaaagcacggggatgttccataacgctagcgggatgctggcgaaagctattgccttgcatggtaatagcgttggtacgggcggagattactctaccggtgctgcgcaggtgatcctgccgcgcgtagtcggtagcatggaagtgtatgaacagcaaacctcctggccgctggtattgcagaacagcaaaaccattgtgctgtggggctccgatttgctgaaaaaccagcaagcgaactggtggtgcccggatcacgatgtttatgaatattacgcgcagctaaaagcgaaagtcgccgccggtgaaattgaggtcatcagcatcgatccggttgtcacatccacccatgagtatctggggcgcgagcatgtgaagcacattgcggttaacccgcaaactgacgtgccgctgcaactggcgctggcacatacgctgtacagtgaaaacctgtacgacaaaaacttccttgctaactactgtgtgggttttgagcagttcctgccgtatctgctgggtgagaaagacggtcagccgaaagatgccgcatgggctgaaaaactgaccggcattgatgccgaaaccattcgtgggctggcgcggcagatggcggcgaacagaacgcaaattattgctggctggtgcgtgcagcgtatgcagcacggtgaacagtgggcgtggatgattgtggttctggcggcgatgctggggcaaattggcctgccaggtggtggttttggttttggctggcactacaacggcgcaggcacgccggggcgtaaaggcgttattctgagtggtttctccggctctacgagcattccgcctgttcacgacaacagtgactacaaaggctacagcagcactattccgattgcccgttttatcgatgcgatcctcgaaccggggaaagtgatcaactggaacggtaaaagcgtaaaactgccgccgctgaaaatgtgtatttttgccggaactaacccattccatcgccatcagcagatcaaccgcattattgaaggcttgcgcaagctggaaacggttatcgccatagataaccagtggaccagtacctgccgctttgccgatatcgtactgcctgcgaccacgcagtttgagcgtaacgatctcgaccagtacggcaatcactccaaccgtggcattatcgccatgaaacaggtggtgccgccgcagttcgaggcgcgcaacgacttcgatattttccgcgagctgtgccgtcgctttaatcgcgaagaagcctttaccgaagggctggacgaaatgggctggctgaaacgcatctggcaggaaggtgtacagcaaggcaaaggacgcggcgttcatctgccagcgtttgatgacttctggaataacaaagagtacgtcgagtttgaccatccgcagatgtttgttcgccaccaggcattccgcgaagatccggatctcgaaccgctgggcacgccgagtggcctgattgagatctacagcaaaactatcgccgatatgaactacgacgattgtcaggggcatccgatgtggtttgagaaaatcgaacgctcccacggtgggcctggcagccaaaagtatccgttgcatctgcaatctgtgcatccggatttccgacttcacagccagttatgtgagagcgaaacgctgcgtcagcaatatacggtagcgggtaaagagccagtattcattaacccgcaggatgccagcgcgcgcggtattcgtaacggtgatgtggtacgcgtctttaacgctcgcggtcaggtgttggcaggggcagtggtttctgaccgctatgcacccggcgtggcacgaattcacgaaggggcatggtacgatccagataaaggcggcgagcctggtgcgctgtgcaaatacggtaaccccaacgtgttgaccatcgacatcggtacaagccagctggcgcaggcgaccagtgcgcacactacgctggtggaaattgagaagtacaacggaacagtggagcaggtgacggcgtttaacggccccgtggagatggtggcgcagtgcgaatatgttcccgcgagccaggtgaaaagttgaattaacccgcgtcgcaggtgaaatcatgaccacgctgacagcacaacagattgcctgtgtttacgcctggctagcgcagttgttctcccgtgagctggacgatgaacaactgacgcaaatcgccagtgcgcagatggctgaatggtttagcttgctgaaaagcgaaccgccgctcactgcggcggtgaacgagctggaaaaccgtattgccacgctgacagtacgtgacgatgcccgtctggaactggccgcggacttttgcggcctgtttctgatgaccgacaaacaagcggcgctgccgtatgcaagcgcctacaaacaggacgagcaagagattaaacgcttgttagttgaggcagggatggaaaccagcggcaatttcaacgaaccggcagatcatctggcgatctatctcgaattgctcagccatctgcattttagcctgggagaggggaccgttcctgcgcgaagaatcgacagtttgcggcaaaaaacactgacggcgctgtggcaatggttaccagagtttgttgcgcgttgtcgtcagtatgacagctttggtttttacgcggcactaagccagttattgctggtgttagtggagtgcgaccaccaaaacagataacgtcgtttgtgcgcctgaaaagacgcgtttagcgtcgcatcaggcattatggcgcagttgccggatgcggcgtgaacgtcttatccggcccacaggaactgtaatctttgtagaccggttaagatgcgtcatcgcatccggcaaacacacatcacggatgagctacaaaccgggaaagccgctggcgcagcaggcggttttcctgcttcaggtgcgcaatatcatccattaacgtcagcgccaccgcgatccccggccagtccagagccagttcatgacgcaggcgtaccgcgcgttgcaccacaatggcggcatggtcgtcaaatacccaggttgtttcctggatctcacgcggttcaaccacccccaaaccgacaatttcattcaactcctcttcagagatgccggtatgcaggcaaaattcggtaatagtaaaagtcaccgtaacattagccattatgctttcccccaatctttacgtggatcaaaagagctctgggcgtctgccagttgctgccacagcgcggcagtgttttcatccggtttcggcggcatcacgattttcagtaccgcatacagatcgccggtctgttttttgctcaccagacctttgcctttaacgcgcaatcgttgcccggcctggctgcctggcgggatagtcagcaaaatgctttctttcagtgttggaacggtgactttagcacccagcgccgcttcccacgggctaaccggcaccacaatttccagatcctggccgacaatatcaaacagcggatgtggcgcaatatgaatcaccagccacaaatcgccatttggaccgccgttttcgcccggcgtcccctggcctttcagacggatgcgttgaccattgccgacgcccgccgggatcttcacattcagcgttttcggaatttcctgttcgatcatgccaaaggcgttataaaccggcaggttatagctgatggtacgcttatgctcagtaagcgtttcttcgaggaataccgccacttcgatttcaatatcgtggccgcgtgtggcggggcgttgacggctctggcgggcatgctgaccgaaaatactgctgaagatatcgtcaaaatcttcggcgttaaaactctgaccgtcgccatggtggaactgacggttaaattgcggatcgttgcgatgttgccacatctgatcatactcagcgcgacgttgttcatcacttaacacttcccaggcttcagcgacctctttgaagcgggcttcggcatccggttctttgctgacatcaggatggtatttgcgggcaagtcgacgataggcggtcttgattgtcttgagatcgtccgtcggtttcacgcccatgatggcgtaataatcctttaattccatagcgttatctcgcgtaaatcaacacaaattgaaggaacccctgtaaggtaactcctataagtgtagggtaatcctcaaaatttcatatgccaacacagaatatgttattgaaatcatcgcggagaggaggtcgccatcaagatgggttgctgaacatattttaaacaggtgaaaaagggtgagcgatttttgatagttgaaccaggcactttaagtttaactagggcgtcattatttattaaattttatagacgctatatatgggtagtaatatacatggaattagttgcactgcaaataattatttgaaacaggcctggaacgatataaaaaatgagtacgaaaaaaatcaaacatatagtatcacgctttttgaaaacacactggtgtgttttatgcggttatacaatgaactcagacgtaaagtaaatgaagaggatactccatgtctggaatgtgaaagtctagaaaaagaatttgaggaaatgcagaatgataatgatctaagtttatttatgagaatattgcgtactaatgatacacaaatttatagtggggttagtggaggtattacatatactatacaatatgttcgagatattgatattgttagagtgtccttgccgggcagagctagtgagtctatcacagattttaaaggttattattggtataactttatggagtatattgaaaacattaatgcgtgtgatgatgttttttctgagtattgttttgatgatgaaaatataagtgtccagccagagcggataaatacgccgggaatatctgatttggattctgacattgatttgtctggtatatcttttattcagcgtgaaactaaccaggcattaggattaaaatatgctcctgtagatggcgatggatattgtctgttaagagctatactggttttaaaacaacatgattatagttgggcgctggtcagttataagatgcaaaaggaagtttacaacgaattcattaaaatggttgataaaaaaacgatcgaggctcttgttgatacggcattctataatctcagggaagatgtaaagacgttatttggcgttgatctacaatctgacaaccaaattcaggggcagagtagtcttatgagttggagctttctgttttttaaaaaacaattcattgatagttgcttgaataacgaaaaatgtatcctgcatttacccgagtttatatttaatgataacaagaacttgcttgctttagataccgacacgagcgataggattaaagcggtgaagaattttcttgttgttcttagtgatagcatttgcagtttatttattgttaatagtaatgtggcaagtatctccttggggaatgaatcctttagtacagatgaagatcttgagtatggttatttaatgaacactggcaatcattatgacgtttacctccctcctgaactttttgctcaggcttacaagttaaacaataaggaaatgaatgcgcaactcgactatttaaatcgttatgcaatttaatggcaaaggcatatgctaaaaaccattgttattagtctcacacttttttattggtaaatattgtctctgtattggtaacgccgcagatattctgtttagccacaggtgcaattatcagcggcgtacgcgaggcaggggctaatcaggcatagtttgcgtcaaaccttgcctgtttttgaagatgtatatagaaaaacaggcgttcaacaagccattttgcgaacctgttcccggaaaaaagtcatatttctgtcacactctttagtgattgataacaaaagaggtgccaggaatgaacaaaacgctaatcgccgcagctgtggcagggatagttttactcgctagtaacgctcaggcacaaaccgtaccggaaggctatcagctacagcaagtgctcatgatgagccgccataacttacgtgcgccgctggcgaacaatggcagtgtgctggagcagagtacgccgaataaatggccagaatgggacgtccccggtgggcaactcaccaccaaaggtggcgtgctcgaagtgtatatgggccattacatgcgtgaatggctggcagagcaggggatggtgaaaagcggggaatgcccgccgccgtacaccgtttatgcctatgccaatagtctgcaacgtaccgttgcgaccgcacagttctttattaccggcgcattcccggggtgtgatattcctgtgcatcaccaggaaaaaatgggcactatggacccaacctttaacccggtgatcaccgatgattccgccgcattcagtgaacaggcggtggcggcaatggagaaagagctcagcaaactccagcttaccgacagctaccagctactggaaaaaatcgttaactataaagattcccctgcctgtaaagagaaacaacagtgtagcctggtggatggcaaaaatacctttagcgccaagtatcaacaagaaccaggtgtttccgggccgctgaaagtcggcaacagcctggtagatgcgtttactttgcaatattacgaaggttttccgatggatcaggtggcctggggagaaatcaaatctgaccagcagtggaaggtgttgagcaagcttaaaaacggctaccaggacagcctgtttaccagtccggaagtggcgcgcaatgttgcgaaaccgctggtcagttatatcgacaaagctctggtcaccgatcgcaccagcgcaccgaaaattacagtgttggttgggcacgactccaacattgcctctctgttaacggcgctggatttcaaaccgtatcagttgcatgaccagaacgaacgcacgccgattggcggcaaaatcgttttccagcgttggcatgacagcaaagccaatcgcgatttgatgaaaattgaatatgtgtatcagagtgcggaacagttacgtaatgccgatgcgttaaccctgcaggcacctgcgcagcgtgtgacgctggaattaagcggttgcccgatagacgctgatggtttctgcccgatggataagtttgatagcgtgttgaatgaagcggtgaaataacagaaaactcccccgcgagaagcgggggagtcgctggttaaacgtttttacgttcgatggtctgttcgccccaaaaaaggctatctttatcggtcttagcaaaggctttgactaacacttcatcactaccttcttcccaaatcttttccgccattttttcgtcgtacccggcgacttcgaaaatggcctcggctatttccgggctcgtattgcgcagagatgcccattcaccgacgtgatgagctttcgcttcttgagttggcatgcgtatcctcctgttgaagattagccgttaagtttaactgccagacctgcgacatattccccttgataacgagcaatagacagttcttcctggctgggctggcgactaccgtcaccgcctgcgatggtggttgcgccgtacggcgtaccgccgcgaacctgactaacgtcaaataattcctgcgctgcgtagccaatagggacaattaccatgccgtgatgcgcaagggtcgtccaggtggatgtgatggtttgttcctgaccgccgccagtaccggtggaactaaagacgctcgccagttttccgtatagtgcgccggaagcccacaggccgcccgtctggtcgaggaaggtacgcatttgaccggacatgttgccaaagcgggtaggtgtaccaaaaataatggcgtcgtaatcggccagttcttgcggggttgcaaccggtgcagtttgcgttttaccgcctgctttttcaaataattgcggcggcatggtttccggtacacgcttaacgacaacttcagcgccatccactttgcttgcaccctcagcgactgcgcgtgccatcgtttcaatatgtccgtacatggaataataaagcaccagaactttagccatttctaaccactcctcgtgttatctctattccgtagcgattcgctaccacttatttaaagataagacgtccttttcagagtgcaaatttcacaaccacttatttgatttataacaactttcacaagcacgtaattttgtcgcaaaatgacacatttttatctcatcgcgtttttttaatcataagagcggcttatggataattattggagatgatatctattctcgctaagaagctgttgcaggatattaccaaacgcgggtctgcccgcgtcagttcactaagcttagtcccacgtagcgaaaatatggcagccgccatacgccgcgttaattctatgcaatatgatgtctatacccagacggaggtcagtaatggcaaaccatcgaggcggttccggcaattttgcagaagaccgcgaaagagcaagtgaagcaggtaaaaaaggtggacagcacagcgggggtaatttcaagaatgacccgcagcgcgcatctgaagcaggtaaaaaaggtggtaagagcagtcacggcaaaagcgacaactaaccgggctaatcaatgacgaatgcatttttgtctgtagctcgtcaaaaagccatcaccgccggttacccggtggttgatactgatgacaaatgtaagcttgcctgatgcgcgatgcttatcaggcctaccagaagattgcaatatattgaatttgcactgttttgtaggccggataaggcgtttacgccgcatccggcatgaacaatgcgtacgttgtcaacaatctgcaccgccggtaaccccggcggttttctgtttatggctcctgatgaacaacttctggcggtggaacgtcaaccaactttctgcttaacaacgcattgagtaaaatcgcgccaaaggttgctgtaccaatccctcccaacgtaaaaccgcccagcgtgagagcaaaatcacccgcgcccagcactaaggttactgcgaccataatcaaattaccgttctggcttaaatcgacacggttttgtacccatatccttgcgcctgcgacggcaatcagcccgaacacaacaatacttgcaccaccaataaccgcggccggaatggtatgaatcagcgcaccaaatttcggactaaagcccaacagcatggcgatgacggcagcagcaacaaacaccagcgtgctgtagactttggtcacggccatcacaccgatattttcagcataggtggtcacgccgctaccgccgacagagccggaaagcatcgttgccagaccatcgcctacgaatgcccgccccatatacgggtccatattgcgtccggtcatcccggcgactgccttgagatgacctaagttttccgccaccagaatcaccgccacgggcgcaatcagcatcattgcctgaccattaaaagcaggagtggaaaaatgtggcagaccgaaccaggcagcatggctgacgagagtaaaatcgacggcttttcccagccctaaaacgttggtcatcacgccatacagcagacaggcgacaattaatcctacgagaatcaataaccgctggatcatgccacgggtaaacaccgccaccagcccaatacacagcaccgtcattaccgccatccagctatcaaaggcgctagcgcttacacttttcactgcgataggcgctaagttcaggccaatcgccatcaccaccgcacccgtcaccaccggcggcatcagtcgttcaatccagcgcgtaccgattttcatcaccaccaggccaatgacggtataaaccagcccacaggcgataatcccgcccagcgcaatgctgatattcgggttaatgccctgaccgttaaagcccgtcgcggcgatcaccacgccgacaaaagccgcgctggagccgagataactggggacgcgcccgccggtaataaagaaaaacagtaacgtgccgatcccgctcattaaaatggaaagattgggatccagccccatcagaatcggcattaacaccgtcgcgccaaacatcgccaccgcgtgttgaacgcccattactgccgtctgagcaaacggcaatcgttcatccggcgcgaccacgccgctctctgtagaggtgctttttaactgccagtgaggaaaaccgaacattgccatcagctgtctccttaaggaggttaacaagcagggcgcatcagcgcgtgataactgcgatcgaaccacaccagcccgtagggtgtggtgtgacgatgaatcgcttcgatggcgcaaaacagaatgtcgtgggtgccgacgctcaccacctggctgatacggcagtcaaagctaaccagagcctcttccagttgcgggcatccggtcacccccgtctgccagcgggcggcggcaaagcggtgttccatgggcgttttgccgccaaaaaggttactaagcggctcctgcccggcgctaagtgtatttacacacagcgttcgattttcattgaatgccggccagacggacgccccacgattcaggcacaccagtaatgtgggcggcgtatcggtcacactgcagacggcgctggcggtgaacccggcgcgcccggctggaccgtccgtggtgataatattgaccgccgcgcccatgcaggacatcgcatcgcgaaaagtttgttgatcgacaatgttcatagtttgctccttacaacagcccgcaggcttcttcaaaggacagacgtggcaggcgcgcataaagcttgctgctatcgccatagccgatattaatcagcagattgctcttcagcgtgctgcccgtaaaaaaggcgtcgtccacgtgttgacggtcaaagccgctcatcgggccggtatccagtcccagcgcccggcaggcgacgatcagataggccgcctgcatggaactgttgcgaaacgctgtttcttcggcaagttgtgggctggaggtaaaccaactgcgggcatcaccgtggggaaacagtagtggtaaccgttcataaaattcactgtcccaggcgacgatagcggtgacgggcgcggtcagggttttttgcagattgccgctggaaagtgccgggcgcagacgttcttttccttctgccgtgcgggtaaacacgatccgtgccggagaacagttagcacttgtcggcccccatttcatcagggcataaatctcccgtaacgtctcatcgctgacgggtgtctcccgccagccgttgtgagtgcgggcatcggtgaacagggtgctaagcgcacctgggctaacggcttcgttcatagcaattccttacagggcggcttcacggtgatgtaacaggctggcaagcccgttgagtaacagagcattaaacgtttcgggatcggtcacgttgcaggcgtgtccgccatagggcatcaccattttctggctatcgggcagggcggcatgaagttcactggaacatgctgttggcaccagcagatcatcactggcgcagatgatttgcaccgggcagcggatgcgatccgcatggtgactaaagtcagcgcgtttgagggcgttaagtcgacgcagtaaattatttttgccctgaaaatgcgccagtgccagcgcgtcttctgcctccaggcgaggtgcgcgggccgccatccagtcggcgggatagaggaacaacggctgcgcttccacccatgcctgcgcgccgccgctatacagtaatcgttcgcgaacctgaaaacagcggcgcgtatgggcgtttattcgtagccagccgttaacgctgatcagcacagttacgctcgcgggataatccagcgccagctgcattcccaccagcgcaccgagcgcatggccgaccactgcgtaatgctcaatccctgcggctaccagcgcctgatgcagttccgctgccatctgggcgatactgtaatcttctgccagcgtgtcgggattattgccggtgccgcgctggtcgtaacagactacctgatactcctgctccagcaccgccagttgcggtaaccagtaactgccgctacccccaagaccgctaatcaacaccactacgggcgcatcagcataagggggaggactgagactaagtttcatcgcggcctcacttggcgatatgcgcaattgtggcgatttccaccagcgcgtcaggttttaccagtccgcactgaatgcagaatcgcgccggtttatcacccggaaaaaactcggcgtagatttcgttaatcgcggcgtaatttttccagtcggtaataaagatgctgttgaaggtcacatccgccatcgtgccacccgccgtctcgatcaccttgcggatagtttccagaacgtggcgggtttgcgcctttgggtcatcggcaaacagcacgttattatgttgatcaaaagccagcgtaccggagacatacaccacgccatcagccagcgtgccgggaacgaagggggccagcggtgcgctgctgccagcgggaataattacggattttggcatcgttaaactccttaagcgatatgagcaaaggacgtgggagaaagcgcgtcgcagaatgtttcgacgtcgctgacccagccaaaaaaggtttcgatattgaacaacgcggctttctgcgcaaatttcggccccgcctggtgagttgcgtcttcaagcaccacgccgaaatactccagaaaaaagccgtcgcgtagcgtgctttcgacgcagacgttggtagcgatgccggtgaaaaccagatggcgtattccgcggctgcgcaaaatgctgtccagcggcgtattgaagaaaccgctgtagcgcggcttcggcagcacaatatcgccaggctgcggcaccagttcatccaccagttgataatcccaggagcctttcgccagcaatttcccctgcagctgcggctgcttacgcatggttttcagggcgttgcttttatgaaaattcggactgccgggtccgccagcctcgacatactgttcatcccagccattttgaaaccagatgatcagcatccctgccgctcgcgctgcggtcacggcggtttgaatgttggcaatgaccgggcgagtggtactgacatcaaacccggcgagatctaagtagccgcctggcgtggcataagcgttttgcatatccaccacgatcagcgcactttgctgcggatcgaaggtaatggcttccggtcgagcggttaaggtcgtcatcatgccacctcctgagtcagcgcaggtagatgggcgcggcattgcatcagtggttgaatgcgctcgccgaaggtttcgattccgctcagaaaatcgtcgaaggttaacagcacgccttcggcaccaggcacgcttgcgacttcatctaacatgcgcgcgacactggcgtaagaaccgactaacgtccccatattgatgtttaccgcgctagtgggatcggccatctgacgaacgttggtgtcagtaccggagcgggtatctttctgactttgttcggttagccagcttaacgcctcttcatccgcgcccgctttgtagtgttcccatttggcgcgagcggcatcgtcggtttcatcggcaatcaccataaacaacacataagagccaacgtcgcgtccggtttgctctgcggcctgtttcatccgcgcagcggtcggggcgaaagccgtgggtgtatttacgcctttgccgaaacagaagttgaaatcggcataccgggcggagaacgccatgccagcgtcgctttgcccggcgcagatcactttcatggggacactcggttgcggactcacgcgacaatcattcatggtgaaaaaatcgcctttaaaatcgcttttccccgtgccccacaggtcgcgcagcacctgaacatattcggtgagatagtcgtaacgacgggagaaatagtcatcgccaggccagatacccatctgctcatactcgggcttttgccagccagtcacgaggttgacgccaaaacgcccgccagagatggagtcgatggttgcggccatacgggcgacgattgccggaggtaacgttaaggtggcagcagtggcgtaaatctgaatgcggctggtcacggccgccagccccgccatcaaggtgaagctctcaaggttgtgatcccagaactcagttttgccgccaaagccacgcagtttgatcatgctcagggcgaaatcgaaatggtagtgctccgctttttgcacaatggctttattcagttcaaaggtcggcatgtactgcggcgcgtgggtgctaatgagccagccgttgttgccaataggtacgaatacgccaattttcatcatcaacctctcttcgtctcgtaaagtgaaagtcagacggggcgctgcatcctgcatatccttttcagccgcgtattggcttgtttgcaaagcggatgccagtttttaaaaagttaatgttattaatctgttaacattacgttatctaaaatatctggtaaaaagtggactaaacggtcaaaacagttgcacataaaacatgcatctgtgcgcgatgagagtgcagaaggtcgaggccgggcgggggttttgctatcctgttgccaatctacaagaggggagagcgcatgacgcaaggcgcagtgaaaacaacgggtaaacgtagccgcgcagtaagcgcgaagaaaaaagcgattcttagcgcagcactggacacttttagtcaattcggttttcacggcacaaggctggagcagatcgcagagttggcgggtgttagtaaaaccaatctgctgtattactttccgagtaaagaggcgctgtatattgccgtgctgcggcagattctcgatatctggctggcaccgttaaaagcgtttcgtgaagatttcgccccgctggcggcgatcaaagagtacatccgtctgaagctggaagtcagtcgcgattatccgcaggctagtcgcctgttctgtatggagatgctggcaggcgcgccgctgttaatggatgaactgacgggcgatttgaaggcattaattgatgagaaaagcgcgctgattgccggttgggtcaaaagcggcaaactcgcgccgattgatccgcagcatttgatttttatgatttgggcttccactcaacattacgccgatttcgcccctcaggtggaggcggtgacaggcgcgacgttgcgcgatgaggtatttttcaatcaaacggttgaaaacgtgcagcggattattattgaggggattcgaccacgttaaagatgccggaggaggttgtaacatcctccggctacctgtttaacctatagtcattaagctggcgttaccgccagcggcagcggtattcacactcaggctacgctcgatatacagccgttccagaaggatattgctttcgccacgggcaaaaccctgcacgctaacaattgtgccatcccgcgcggcaactgcttcacacaatgcgcgaagctgatcgctatcaccgtggaagatcaccgcatcaaacggttgagcggttatattttccgctttcgccagttgaatacgttcgctgactgcgcttggcaatgccttcactaactgacgatgcagcgcgtcatccggccacagtacctggctgcccaccgccagcacggcggcgagctgagtcagcgcatcctgctcatcatcggcaatacacaacacgcgctcacgcggcagcagcgtccaggtgttgcgttcacccgtcggccccggcagcaatcgttgtgttcctgcctgcgccagctcgccatattgcgtacataacgcctgcaattctggacgatttgctgcccattcccgcagtgcatttagcggctgagtcaatgcggctttcaactgcgcatcgaccggatactttgcatcctgacgcgcgagcgtcactgccagcgcactttccgggcgattcgccagcagacggtagagatagagcggaccgcctgctttcggcccggtaccggacaacccttcgccgccgaacggctgcacaccaaccactgcgcccaccatattacggttaacatacaggttaccaacatgggcgctgccagtgacctgggcgatggtttcatcaatgcgcgtatggacgccaagcgtcagaccataaccggaagcgttaatctgctcgatcagctctggtagctggttacggttgtaacgcaccacatgcagcaccggaccaaagacctctttttgcaattcggcaaagtcatccagttcgatcagcgtcggggcgacaaaggtgccgctttgccattcacgggcatcttcgctgttttcccgcaccgcctggaacaccggacggcctttgctacgcatggtctgaatatggcgctcaatattggctttcgcttcgctatcaatcactggaccgatatcggtggtcaggcgacccggattacccatccggcattcggccattgcgccgcgcagcattttcaacgtgtggtcggcaatctcatcttgcaggcacagcacgcgcagcgcgctacaacgctgacccgcactgtcgaacgcgctggccagtacatccacgacgacctgttcggtcagtgcactagaatcgacaatcatcgcgttcatgccgccggtttcagcgatgagcggaatagggcgaccctgagcgtccaggcggctggcgatattgcgctgcagtaacgtagcgacttcggtactaccggtaaacatcaccccgcgcacgcgatcatcacccgtcagttgcgcgcccacggtttcaccccgacctggcagcaattgcaccacgcctggcggtacacccgcttccagcaaaatggcgatcccttgcgcggcaatcagcggcgtttgttctgccggttttgccagcacgctgttacctgccgccagtgcggcggcgatctgcccggtgaaaatagccagcgggaagttccacggactgatacacaccacaggccctaatggacggtgggtttcgttagcgaaatcatcccgcacctgtccggcgtagtagtggagaaaatcgaccgcttcgcgcacttcggcaatggcgttactgaaggtttttccggcctcacgcaccagaataccaatcagttgctgcatctggctttccatcagcacggcagcgcggtgcaaaatcgctgcgcgttcagccggaggcgtggcaaaccagattggcgcgttattaaccgcactttccagcgcctgttctacttcacgcggcgtggcttcacgcacatagcccacaatatctttcggttccgcagggttaataacggggctcatctcacctgccgctaccggttgttccagcattggcaaggcctgccatttttgcagtgcactattgagcagggcagaggagaggctggccaggcggtgttcgttagcgagatccagccctgcgctgttgtcgcgcccgtgaccgtaaagatcgcgcggcaggggaattttcggatgcggtaatccagtttgcccttcctgttgcgccagtttttctacagcagtgaccggatcggcgaccagttcatccagtggcaaagaggtgtcggcaatacggttaacaaagctggtgttagcaccgttttccagcaggcgacgcaccagatacgccaacagcgtttcatgtgtgccaaccggagcataaatacgacacggacggttaagtttgccgtcggcaactttcccggggacctgctcatacagtggctcgcccataccatgcaggcactggaactcgtactgacccgggtagtagttctgccccgccagttgataaatcgccgccagcgtatgggcgttgtgcgtcgcgaactgcgggtagattagattcggcaccgccagcagctttttcgcacaggcgagataagaaacgtcggtatacaccttgcgggtataaaccggataaccttcaaggccgtccatctgcgcacgcttaatttcactatcccagtacgcgcctttcaccaggcgaatcatcagacggcgacggctgcgggtggcgagatcaatcaggtaatcgatcaccaacgggcagcgtttttgataagcctgaataacaaaaccgatgccgttccagcctgccagttccggctcgaaacagagtttttccagcagatcgagggagatctccaggcgatcggactcttcggcgtcaatgttgataccaatatcgtactgacgcgccagcagggtgagacttttcagacgcgggtaaagctcttccattacccggtcatactgggcgcggctataacgcggatgcagcgcgctcagtttgatactaatgcccggcccttcatagatgccacgaccgttagacgctttaccgatggcgtgaatcgcctgctgataggaaaccatatacgcctgtgcatctgcggcggtcagcgcggcttcgcccagcatatcgtaagagtaacggaaacctttctcttccagcttgcgggcattggctaacgcttccgcgatggtttcgccagtgacgaactgctcacccatcaggcgcatcgccatatccacacctttgcggatcagcggttcaccgcttttaccgataatgcggttcaggctgcgggagaggctggcttcgttatgggtggaaaccagtttgccagtaaacagcagcccccaggtggcggcattaacaaacagactcgggctacgaccaatgtgactctgccagttaccgttgctgattttgtcgcgaattaacgcgtcgcgggtggctttgtcgggaatacgcaacaacgcttccgccagacacatcagcgccacgccttcctggctactcaggctaaactcctgcaataacccctggaccatacctgcgcgaccactggcatttttttgattacgcagtttatcggccagctgatacgccagtttgtgcgcctgttcagcaactggctgcggcaggcgggcttgttccagcagcatagaaaccgcttcggtttccgggcggcgataggccgcggtgatcgcggcgcgggaaacgctctggggcaatatttgctcggcaaagtcgaggaatggctggtgtggttcctctgccggagtcggtgcttcatcgctctcattggccgcgccagaaagcagcgcaggtagctccggcagagtatcgctgttttccagttgttcgagataagaaaaaatcgcctgcttaattaaccagtgtggtgtgcgatcgatacgtgtcgcggcagacttaatacgctcacgcgtcgcgtcgtccagcttaacccccatggtggtggttcccatgccattactcctgttgttcagaaaggtgcaacttaacgttatcgtgaaatatccatgatgttgcaactttgtgcaaccatgttaaatgtgacatgcgtagcaagcttaaaaatgaatgaaatgttaataaaagaaatcgatatgacagggattaaaaaaataactcagactttttctctgcggcagttaacatttttgaaaggtgcaaccgcaaaaaatgtgagagagtgcaacctgatgaaaaatagtgtcgctgagcactaaaatttaatgtaaatggtgtgttaaatcgattgtgaataaccagcgcttccggcaggatacggtcgccctggtaaaacataaactctgttaccccgttccggtggcagatataacggcaagtttcgacattgccgataataattttttggagactttagatggctattagcacaccgatgttggtgacattttgtgtctatatctttggcatgatattgattgggtttatcgcctggcgaagtacgaaaaactttgacgactatattctgggcggtcgtagtcttgggccattcgtgacggcattaagcgcgggtgcgagcgatatgagcggctggctgttaatggggttgccgggcgctgtttttctttccgggatttccgaaagctggatcgccattggcctgacattaggcgcgtggattaactggaagctggtggccgggcggttgcgtgtgcataccgaatacaacaataacgccttaacactgccggattatttcaccgggcgctttgaagataaaagccgcattttgcgcattatctctgcgctggttattttgctgttcttcaccatttattgcgctagcggcattgtggcaggcgcgcgtctgtttgaaagtacctttggcatgagctacgaaacggctctgtgggcgggcgctgcggcgacgatcctttacacctttattggcggtttcctcgcggtgagctggactgacactgtacaggccagcctgatgatttttgccctgatcctgacgccggttatcgtcattatcagtgtcggtggctttggtgacagcctggaagtgatcaaacaaaagagcatcgaaaacgttgatatgctcaaaggtctgaactttgttgccattatcagtctgatgggttgggggctgggttacttcgggcagccgcacattctggcgcgttttatggcggcggattctcaccacagcattgtccatgcgcgtcgtattagtatgacctggatgatcctctgcctggcaggggcggtggctgtcggcttctttgggattgcttactttaacgatcatccggcgttggctggtgcggtaaatcagaacgccgagcgtgtgtttatcgaactggcgcaaattctgtttaacccgtggattgccgggattctgctgagcgcaattctggcggcggtaatgagtaccttaagttgccagctgctggtgtgctccagtgcgattaccgaagatttgtacaaagcgtttctgcgtaaacatgccagccagaaagagctggtgtgggtagggcgtgtgatggtgctggtggtggcgctggtggcgattgcgctggcggcaaacccggaaaaccgcgtgctgggcttagtgagctacgcgtgggcaggctttggcgcggcgtttggtccagtggtgctgttcagcgtgatgtggagtcgcatgacgcgtaacggtgcgctggcggggatgatcatcggtgcgctgacggttatcgtctggaaacagttcggctggctgggactgtacgaaattattccgggctttatcttcggcagtattgggattgtagtgtttagtttgctgggtaaagcgccgagtgcggcgatgcaaaaacgctttgccgaggccgatgcgcactatcatagcgctccgccgagtcggttgcaggaaagctaagggacttagcctgcggcggttttgtttggcttcagcagcgggttgcgctcccttaatgtgcctcgccatataaattgaatggtgcagggagcgcgcagggggcggccaatcgccgccgccccctgctgtcccggccttcggggaacgcttcagcgattttgacgccaccaacacccgagctgttattatgttccgggcaaaaagttagatttgataatcgcggatggacgaaattgcttgatacacccgcttatcagttttacatggaagctctgatgcattgagtctggacagttttgtcggctggatacggcgtttacgcggcatccggcaagaacacatggttctttgcaaacaatcccatctttctaccctggaataatcgtttatatcccttggcattacctctctttgtttacattccaacatcattttataaacattccgcttgtgtttttctttgccgtaatgataatcgctatcactgcgatttacttttctttgcatagattgactcagaaaaacgtttaagggtgggtggcatgtttgttccgtttctcattatgttgcgcgaaggacttgaagccgcgctgattgtcagtttgattgccagctatcttaagcgtacccagcgaggccgatggattgtgtgatgtggattggcgtgttgcttgccgctgcgttgtgcctgggcttgggtatcttcattaacgaaaccaccggcgaatttccgcaaaaagaacaggaactgtttgaaggtatcgtggcggtgatcgccgtggtgatccttacctggatggttttctggatgcgcaaagtgtcgcgcaacgtcaaagtgcaactggaacaggcagtcgatagcgcattgcagcgtggaaatcatcatggctgggcgctggtgatgatggtcttttttgccgttgcaagggaagggctggagtcggtctttttcctgctggcggcatttcaacaagatgtcgggatctggccgccgctgggtgcaatgctcggtcttgctactgccgtggtgctaggcttcctgctctactggggcggtattcgcctcaatcttggtgcattttttaaatggaccagcctgtttattctcttcgtcgccgcagggctggcagctggtgccattcgcgcatttcatgaagccggattgtggaaccactttcaggaaatcgccttcgatatgagtgcggtgctctcaactcactcgctgtttggcacgctgatggaagggatttttggctatcaggaagcgccgagcgtcagcgaagtcgccgtctggtttatttatctcatcccggcgctggtggcatttgctctgccaccacgcgcaggggcgacagcgtctcgctccgcgtaacaaatacgacgcaaactcttgcttagttacaacatactttaaagggatagtctcgtcatgaccattaacttccgccgtaacgcattgcagttgagcgtggctgcgctgttttcttctgcttttatggctaacgccgctgatgtgccgcaggtcaaagtgaccgtgacggataagcagtgcgaaccgatgaccattacggttaacgccgggaaaacacagttcattattcagaaccacagccagaaggcgctggagtgggagatcctcaaaggcgtgatggtggtggaagagcgggaaaatatcgcccctggctttagccagaaaatgacggcgaatttacagcctggcgaatacgatatgacctgcggtctgctgactaacccgaaagggaagttgatcgtcaaaggtgaggcaacggcggatgcggcgcaaagtgatgcgctgttaagtcttggtggtgcaattactgcatataaagcgtatgtcatggcggaaaccacgcagctggtgaccgacaccaaagcctttaccgacgcgattaaagcaggcgatatcgaaaaagcgaaagcactgtatgcaccgacgcgccagcactatgagcgtattgaaccgattgctgaactgttctccgatctggatggcagcattgacgcccgtgaagatgattacgagcaaaaagccgccgacccaaaattcactggtttccaccgtctggaaaaagcattgtttggcgacaacaccaccaaagggatggaacagtacgctgagcagctttataccgatgtggtcgatttgcaaaaacgcatcagtgaactggctttcccacctagtaaagtggtcggcggcgcagccggactgattgaggaagtggcagccagcaaaattagcggtgaagaagatcgctacagccacaccgatctgtgggatttccaggctaacgttgaaggcagccagaaaattgtcgatttgctgcgtccacaactgcaaaaagccaacccggaactgctggcaaaagtcgatgccaactttaaaaaggtcgataccattctggcgaaataccgtactaaagacggttttgaaacctacgacaaattgaccgatgccgaccggaatgcactgaaaggaccgattactgcgctggcggaagatctggcgcaacttcgcggtgtgctgggactggattaagcgttatgcagtataaagatgaaaacggcgtgaatgaaccgagtcgccgacgtttactgaaagtgataggtgcactggcgctggcgggaagttgtccggtcgctcatgcacaaaaaacgcaaagtgcgccgggtacgcttagtccggatgctcgcaatgagaaacagccgttttatggtgagcatcaggcagggatcctgacgccacaacaggccgcaatgatgctggtggcgtttgatgtgcttgccagcgataaagccgatcttgagcggttgtttcgcttgttgactcagcgttttgcttttctgactcagggcggagcagcaccagaaacgccaaatccgcgcctgccaccactcgattccggcattcttggcggctacattgcgcccgataatctcaccatcacgttaagcgtgggtcacagtttgtttgatgagcgctttggccttgcgccacagatgccaaaaaagctgcagaagatgacgcgtttccccaacgacagcctggatgcggcgttatgtcatggtgatgtgttgctacagatttgcgccaacacccaggacacggttatccatgcgctgcgcgatatcatcaaacacacgccggatttgctcagtgtgcgctggaagcgggaagggtttatttccgatcacgcggcgcgtagtaaaggcaaagagacgccgattaatttgctgggtttcaaagacggcactgccaatcccgatagccagaatgataagttgatgcaaaaagtggtgtgggtaacggcagatcagcaggagcctgcgtggacaatcggtggcagctatcaggcagtacgcttgattcagtttcgagtggaattttgggacagaacgccgctgaaagaacagcagacgatttttggccgtgataagcaaaccggtgcgccgctgggaatgcagcatgagcatgatgtgcctgattacgccagcgacccggaagggaaggtgatcgcgctggacagccatatccggctggcgaatccccgcacggcggagagtgagtccagcctgatgctgcgtcgtggctacagttatagtctgggcgtcaccaactccgggcaactggatatggggttgctgtttgtctgctaccaacacgatctggaaaaaggcttcctgacagtacaaaaaaggctcaatggcgaagcgctggaggaatacgttaaacctatcggcggcggttatttttttgcgctgccgggggtgaaggacgcgaacgattatttcggaagcgcgttattgcgggtttaatgtttttaggcggataaggcatttgtgcgcagatgcctgatgcgacgcttgcgcgtcttatcatgcctacaatcagtgcgggtttggtaggctggataaggcgttcacgccgcatccggcgatcgtgcactgatgcctgatgcaaatcctgctgaaagcacacagcttttttcatcactgtcatcactctgtcatctttccagtagaaactaatgtcactgaaatggtgttttatagttaaatataagtaaatatattgttgcaataaatgcgagatctgttgtacttattaagtagcagcggaagttcccggcagtgatagtcagtcactatggagatcgcggatggtaacgtcctgtactggacatgttttagataatcaacgcgccaccactcgcggagttttctcctccggtagtcatctcgtcactttgcattttcaacctcatcctttctttagttgtgttaccgacgccgtaaacggtgcgcgtagccgttttagcgcattttatccaaaagcaaactatggcttacaaggaagccaaccctctgatgttcgtgcgcataatcgcgctgccaacggcgcgtgtgatgaatacaaacaactcaaggtgctctccatgggaagacaaaagcagtgatcaaagctcgtcgcgaggcaaaacgtgtgctgagacgggatagccgcagccataagcagcgtgaagaagaaagcgtcaccagccttgtgcagatgggcggcgtagaagccattggtatggcccgcgacagtcgcgatactagccccatcctcgcgcgaaatgaagcgcaattgcactatctgaaggctattgagagtaagcagctgatattcgccacgggcgaagccgggtgcggaaaaacctggatcagcgcagcaaaagcggcagaggccctgatacataaggatgtcgacaggattatcgtcacccgtccagttctgcaagccgatgaagatcttggcttcttacctggagatatcgcagaaaagtttgctccctattttcgcccggtctacgacgtgctggtccggcgcttaggggcttcctttatgcagtactgcctgcgaccggaaatagggaaggtggaaattgcgccgttcgcctatatgcgtggacgtacctttgaaaatgcagtcgtcattcttgacgaggcgcagaatgtgactgccgcgcaaatgaaaatgtttttaacccgcctcggggagaacgtgacggttatcgtcaacggtgatatcacgcaatgcgatttgcctcgcggcgtgtgctccggattaagtgacgcgctggaacgtttcgaagaagatgaaatggttgggatcgtccggttcggtaaagaggactgcgtacgtagcgcactttgccaacgtacgctgcatgcctacagttaagtgtgttatcggtgcagagcccgggcgaaccgggctttgttttgggtgttcccggtgtgtgcaatatacgaaaaaaaagcccgtactttcgtacgagctcttctttaaatatggcggtgagggggggattgactcgcttcgctcgccctgcgggcagcccgctcactgcgttcacggtctgtccaactggctgtcgccagttgtcgaaccccggtcggggcttctcatccccccggtgtgtgcaatatacgaaaaaaaagcccgtactttcgtacgagctcttctttaaatatggcggtgagggggggattcgaacccccgatacgttgccgtatacacactttccaggcgtgctccttcagccactcggacacctcaccaaattgtcgttcctgtcttgctggaacgggcgctaatttagggaaatcatgacctgaggtcaacaaactttttgaaaaaatcgcgcgtttattcaaacttcaatcaatgtgtggttttaataagcgaaatctgctttttttgccaccgaccacggatttgttatgctggtggcctttgtagatcataacgataagtgcgaataaatttcgcacaacgcttttcgggagtcagtatggatatcatcttttatcacccaacgttcgatacccaatggtggattgaggcactgcgcaaagctattcctcaggcaagagtcagagcatggaaaagcggagataatgactctgctgattatgctttagtctggcatcctcctgttgaaatgctggcagggcgcgatcttaaagcggtgttcgcactcggggccggtgttgattctattttgagcaagctacaggcacaccctgaaatgctgaacccttctgttccactttttcgcctggaagataccggtatgggcgagcaaatgcaggaatatgctgtcagtcaggtgctgcattggtttcgacgttttgacgattatcgcatccagcaaaatagtagccattggcaaccgctgcctgaatatcatcgggaagattttaccatcggcattttgggcgcaggcgtactgggcagtaaagttgctcagagtctgcaaacctggcgctttccgctgcgttgctggagtcgaacccgtaaaagctggcctggcgtgcaaagctttgccggacgggaagaactgtctgcatttctgagccaatgtcgggtattgattaatttgttaccgaatacccctgaaaccgtcggcattattaatcaacaattactcgaaaaattaccggatggcgcgtatctcctcaacctggcgcgtggtgttcatgttgtggaagatgacctgctcgcggcgctggatagcggcaaagttaaaggcgcaatgttggatgtttttaatcgtgaacccttaccgcctgaaagtccgctctggcaacatccacgcgtgacgataacaccacatgtcgccgcgattacccgtcccgctgaagctgtggagtacatttctcgcaccattgcccagctcgaaaaaggggagagggtctgcgggcaagtcgaccgcgcacgcggctactaataaagcatcaggattcctgctatccttggcgggaattgaatacaggagagagttatgtatcccgtcgaccttcatatgcataccgttgccagcacacatgcatatagcacattaagtgattacattgcccaggccaaacaaaagggcattaaactttttgcgatcaccgatcatggcccggatatggaagatgcgccgcatcactggcacttcattaacatgcgtatctggccgcgagtggttgatggggtagggatcctgcgcggcatcgaagctaacattaaaaatgttgatggtgaaattgactgcagcggtaaaatgtttgacagcctggatctaattattgccggttttcatgagccggtttttgcgccacatgataaagcgaccaatacacaagcgatgatcgccactatcgccagcggcaatgtgcatataataagccatcccggaaatcccaaatatgaaatagatgtgaaagccgttgctgaagcagccgcgaaacatcaggtggcgctggaaatcaataattccagttttttacacagtcgtaagggcagtgaagacaactgtcgtgaggtagccgcagcggtacgtgatgctggaggttgggtggcattaggcagcgattctcacaccgcgtttaccatgggggaatttgaagagtgtcttaaaatcctcgacgcggtagattttccgccagagcgcattttgaatgtttctccgcgccgcttactgaacttccttgaatctcgcggtatggcaccgattgcggaatttgcagacctttaattactagtaatggaaatatattaatgaacgagttttctatcctctgtcgtgtgctgggtagcctctattaccgccaaccacaagatcctttactggtgccgctgtttaccctgattcgtgaggggaaactggctgcgaactggccactggagcaggatgagttgctgacacgtttgcagaaaagctgtgatatgacgcaagtctctgccgattacaatgcgttgtttatcggcgatgaatgtgctgtgccgccatatcgtagcgcatgggttgagggcgcgacggaagcggaagtgcgcgcttttctttctgagcgagggatgccattagcggatacgccagccgatcacatcggcacattgctgctcgcagcttcctggctggaagatcagagtacggaagatgagagcgaagcactggaaacactgttcagtgagtatctgttaccctggtgtggtgcgttccttggcaaagtggaggcccatgcaaccacgcctttctggcgcaccatggcaccgctaacccgcgatgccattagtgcaatgtgggacgagctggaagaagattctgaagaataagtgtgatctacgtcactcataactgcaacggataatttgttgttgcataaaatgtgtgctcgatctcattcatggccgcgttttctgctatcatgcgcggcatgaacatacttctctctattgcaatcacaacaggcattctctccggtatctggggatgggtggctgtttccctgggcttactaagctgggcgggcttcctgggctgtacggcctactttgcctgcccgcaaggtgggctgaaagggctggcgatctccgctgcaaccctgcttagtggcgtggtgtgggcgatggtcattatttacggtagtgcactggcaccacatctggaaattctcggttatgtcataaccggtattgtcgcgtttctgatgtgtattcaggccaaacagctgctgcttagttttgttccggggacgtttataggcgcatgcgcgacgtttgccgggcagggtgactggaaactggtgttacctagcctggcgcttgggctgatatttggttacgcaatgaaaaacagtggcctgtggctggcggcgcgtagtgcaaagacggcgcaccgtgagcaggaaatcaaaaataaagcgtgaggggcactcacgctttcgcttaaacagtaaaatgccggatgataattccggcttttttatctgtcaggattccggtggaacgctcatatggcggtatttcaccagaatgtcattctgccgttctgctttattttgcaaatcccacagaccacggtcgataccatcattaatcaggaaaatgacccctgtttcgatagcgctcatcaggcacagcataacaggttcgttgctggtgtaacccacttccccttcaagcaagcgctggtagtcaataaagcggaaaaccccggcctgaacttcataggaaagtatcgtcttactggtgttcacgctagaaaggatctcgccggtactcacattgacgacgcgcaggttcacggcaatctgatcgagctggtattgcgtgtcggcaccgatgccaaaatatcttgccccaaccccgccagatttgacgttgctttcataaccgataatgctaccttcaaccatgatatttgccgccgttaaagattgcagcgggattcggttattaatggcaaccgtgccgttttcttgtgccgcacgaataatcttgcgctcgttaagcaggttttgtaagccctggcgctccagcggtataaaccagcgagaatctttcagtgccgtgaccagcattgccgtggcgctttgcggaacagcagtggagaagttacttgccgggtagggtttaaattgcccggtttcgtcctgaatgttgtatacgctaacaaagattttacccgtcggcgctggcagatgggtcaaatctttgtagctctgagcacgaggcattaatgtcggtctggcggcttctttaggcggggcggttaagcatccgctcagtaacatgacggcaaccaaaagaaataagcgctgcatgattattttccttatgaagctggggcttaaaaatcggtactgttattttgtaaaccgctaacctggatggtgctggtttgtccggttttacgatctgtcacgttcaactgcaattgaccatcgcggttggcaatatcgacaatataatcgttggtcaccatgcggcccggtttaccggtattaatattgctcagtagcccacctaaaatttgactctggatggcctgagtaaagttatctaacgcactgggtgtttcaataccaaagtcatcgttatagctcggatctttataagagttttgggcctgagcgctatttaataaaaaagcgccattatttgggttaccaccaaagtttggattacggaactggaaagtcatggttccagcccaacttaatgggctaataagcatgagtagaactactgcatgtttgacacgcattgcagcctccgaacaattttttatttagaattcatcatgcgccaaatcgcccgtacttaataacgcctgatttatctggcgacgatttagtgcttcttcagtttgaatcagtgcaaagacgacagttttctcgaagtctcttttcaacggaaataaaaaagtctggaaaataacgtcctgattgaccgttatagtgatccagcttccccatcgtgcactgggcctttcattaatcgttaagttacccgtatagtcactttcccatttatcactaaaggctcggtaaaaatcatggccaatagaactaacagtatggtcagttagcaatcccgggacttctacctcaacggcgtgaagattccctgcggcgaacagaaattctgccgccacaatccagcgtaaataacgtttcatggctttatcgcctgaggttatcgtttgcccaggaaaccgcttgtgtccggttttttacggctatcttcttgaaaagattataaagatgcgttttaaccgtattttcgctgatgaacaagctacgagcgatctcgttattagacgcgccgatacgcagcttattcaggatctctttttcccgatgagtaaggagggcactttccgtgctgttataacgatagttaccactatgcgtaatcaggtagctggcaagcttttgcgtaaagtagcattcgccgcgcaggacgccttgcaacccattgacaacacgttcttgatcctccatggaataaaaaacgccgttgatatgaggccagttttcaatgtcgcggtacgggtaatcttcaggcgtatttagcaacaatattttgatattgttgtttttcctgctcaaagtatcctgccaataatggataagctttttatccgcttccatcatatccagaagaataatagagccactagagatatcgtccagagaacgttgaatattatgtaattttcctgtaattgccaggctttgtttaaggtgctgcaagagagctgtcgcctgcaaagaagatttagtgatcaacaataatgtatgaccatgaatactatggacttcattaaacatgatgaaaccccgctttttttattgatcgcacacctgacagctgcctctaaaatagaagcaccagaagtactgacagatgttgcactgctgtgtgtagtaataaatcagccctaaatgggtaaaatataaaactaatggattacatctgatttcaatctagccattacaaatcttaaatcaagtgttaaacatgtaactaaatgtaactcgttatattaaaatgttaaccttaaggttttattaagtttagaaatgatagaaaagttgtacatttggtttttattgcacaattttaaaaaatcatacaaatggtgataacttactaataatgcatataaaaaatatttcggtgtagtcctttcgtcatgtaaaacgttcttgttttttctccacacctccgtggacaattttttactgcaaaaagacgaggtttgtcacggcttgtgcgcaagacatatcgcagcaatcagcgacgggcaagaagaatgactgtctggtgctttttgatagcggaaaacggagatttaaaagaaaacaaaatatttttttgcgtagataacagcgtatttacgtgggttttaatactttggtatgaactaaaaaagaaaaatacaacgcgcgggtgagttattaaaaatatttccgcagacatactttccatcgtaacgcagcgttaacaaaatacaggttgcgttaacaaccaagttgaaatgatttaatttcttaaatgtacgaccaggtccagggtgacaacatgaaaaacaaattgttatttatgatgttaacaatactgggtgcgcctgggattgcagccgcagcaggttatgatttagctaatagtgaatataacttcgcggtaaatgaattgagtaagtctagttttaatcaggcagccataattggtcaagctgggactaataatagtgctcagttacggcagggaggcagtaaacttttggcggttgttgcgcaagaaggtagtagcaaccgggcaaagattgaccagacaggagattataaccttgcatatattgatcaggcgggcagtgccaacgatgccagtattagccaaggtgcttatggtaatactgcgatgattatccagaaaggttctggtaataaagcaaatattacacagtatggtactcaaaaaacggcaattgtagtgcagagacagagccaaatggctattcgcgtgacacaacgttaatttccattcgacttttaaatcaatccgatgggggttttacatgaaacttttaaaagtagcagcaattgcagcaatcgtattctccggtagcgctctggcaggtgttgttcctcagtacggcggcggcggtaaccacggtggtggcggtaataatagcggcccaaattctgagctgaacatttaccagtacggtggcggtaactctgcacttgctctgcaaactgatgcccgtaactctgacttgactattacccagcatggcggcggtaatggtgcagatgttggtcagggcagtgatgacagcagtatcgatctgacccaacgtggcttcggtaacagcgctactcttgatcagtggaacggcaaaaattctgaaatgacggttaaacagttcggtggtggcaacggtgctgcagttgaccagactgcatctaactcctccgtcaacgtgactcaggttggctttggtaacaacgcgaccgctcatcagtactaatacatcatttgtattacagaaacagggcgcaagccctgttttttttcgggagaagaatatgaatacgttattactccttgcggcactttccagtcagataacctttaatacgacccagcaaggggatgtgtataccattattcctgaagtcactcttactcaatcttgtctgtgcagagtacaaatattgtccctgcgcgaaggcagtagtgggcaaagtcagacgaagcaagaaaagacccttagtttgcctgctaatcaacccattgctttgacgaagttgagtttaaatatttccccggacgatcgggtgaaaatagttgttactgtttctgatggacagagtcttcatttaagtcaacaatggccgccctctagtgaaaagtcttaatttgttgaaatatcgagcataagatgaatctggagagaatggtctgctgcgaatcagccaacctgaaagtatggataacacaaccctcaaggatgactaatcattgaggaaatagaataaatgttcagaccttttttaaactctcttatgctcggcagtttgttttttccttttattgccattgctggaagcaccgtgcaagggggcgtgatccatttttatggccaaattgtggaaccggcatgtgacgtcagcacccagagtagtcccgtagaaatgaactgcccacagaatggttctattccgggcaaaacctactccagcaaagcgttaatgagcggcaatgtcaaaaacgcgcaaatagccagtgtaaaagtgcagtatcttgataaacagaaaaagctggctgtaatgaacatcgaatataactaagtttctgaacaactcacgttgctgagcagaaaaatgcgatttaaccaaaaagcctgctgtacacttaagaaacaagaaggtgtaaggaggcgttatgaaaacgcgtattcatgttgtgcagggtgatattaccaaactggccgttgatgtgattgtgaatgcggctaatccgagtttaatgggaggcggcggcgtcgatggggccattcatcgcgcagcgggtccggccctgctggatgcttgtttaaaagtcaggcaacagcagggcgattgccctacggggcatgccgttattacgcttgcaggcgatcttcccgctaaagccgtagtgcacaccgtcgggccagtctggcgtggtggtgaacaaaacgaagaccagcttttgcaggatgcctatctcaatagcctacgactggtggcggcaaacagctatacgagtgtggcttttcctgcaatcagtactggggtttatggttaccctcgtgcggcagcggctgaaatcgcagtaaaaaccgttagtgaatttattacccgtcacgctttacccgaacaggtatactttgtctgttatgatgaagaaaacgcccacctctacgaaagactccttacccaacaaggagatgaatgatttgccccggctggcgagcgcggtgctgccactgtgtagccaacatcccggtcagtgtggcctttttcctctggagaaaagtctggatgcgtttgccgcccggtatcgtctggccgaaatggcagagcatacgctcgatgttcagtattacatctggcaggacgatatgagcggtcggttactgttttccgccctgttagccgcagcaaagcgtggcgttcgcgtccgtttgttgctggacgacaacaatacgcccggacttgacgacattttacgcttgcttgacagtcatccacgcattgaagtccggctttttaatcctttcagctttcgcttgctgcgtccgcttggttatatcaccgacttttcccgtcttaatcgccgtatgcacaataaaagtttcactgtcgatggcgtggtgaccctggtgggaggacgaaatattggtgatgcctattttggagcaggggaggagccactttttagcgatttagatgtcatggcaataggacccgtggtagaggacgttgccgatgatttcgcccgctactggtattgcaaaagcgttagtcccttacagcaggtgctggatgtcccggagggtgaaatggcggatcgcatcgagttacccgcctcctggcataacgatgccatgacgcatcgttatttacgcaaaatggaatccagtccatttataaatcatctggttgatggaacattgccgcttatctgggcgaagacacgtttattaagtgatgatccggcgaaaggggagggcaaggcaaaacggcatagtctgttaccgcagcgcctgttcgatatcatgggcagtcccagtgaacgcatcgatattatctcttcctattttgtaccgacacgcgcaggtgtggcgcaactcttacggatggtgagaaaaggggtaaagattgcgatcctaaccaattctcttgccgctaacgatgttgctgtcgtccatgccggatacgcgcgctggcgcaaaaaattgctccgctatggcgtggaattatatgaactcaagccgacgcgtgaacaaagtagtacgttacacgatcgcggcataaccggtaattccggagccagcctgcatgctaaaacctttagcatcgatggtaaaacggtgtttatcggctctttcaatttcgatccgcgtagtacattgctcaatactgaaatgggcttcgtgatagagagcgaaacgctggcacagttaattgataaacgctttattcagagccagtatgatgcggcctggcagctccgtctggacaggtggggacggatcaactgggttgatcgtcatgcaaagaaagagattattctcaaaaaagaacccgccaccagtttctggaagcgggttatggtcagactggcgagcatattgcccgtggaatggttattgtaaatgtggcttaacgggctggtgctttatcgttctcacgcttaacaaccggtttaccagagaacaaaaacttcagtaacgggatgcgcaaatgaatttcatacagaattatcgcaatccctactacaaatatcaggccacagagaaaaccaagccagttggaggtgatgtgcggtgtaatgtatgcgccgaaaaacagcgttaacgggtggtgaaccagatagataaacaggcttgcgttaacaaaataagtcacccgcgcactctggaagttaagcaaacggtggccaaaggagaagaccacattcaccatccacagaccgaggaccatggtgatcacgctctcggtttcgtacatccaggcatcgccactgccatagcgctggttgagtaaataagcgacaaacgccaatgctgctgcaagggtacagccacgagacggcgtggtaaacaaggctttaagatgagggaaaatgaaagccagtgcgccgaggataaagaacggcaaataaaacagcgtttgcatgacaataaaattgaacatgccattactcagaatgggcggatacacaataaaaatcgttcttcttattaccgcataaccgatgccgaggcataaaaaaatcacgcttagttttaccatgctgaattttttattcgttttatcagaattttctaaattatttctgatgcgcttaaatatccatacgcacagcgtcgtcatgaccactaacaccagtaaaaaccacaggtgacttattaattcccaggccaacgtattatatttgtcatacaaactcagcccaggccaactttccgcttttcctttgacatattgcagcataataaattgcggtaatgtcagtagggggatggctgttaacatcgggatacctacacgttcgacacgtactttccaccattttttcaagggatagcgtaaaaaaagcatgtaggaaaagtagccggatataacgaaaaatacctgcatgcggaagctgtggatgaagtcattaaaaagggtcagccacaaactactttcggcgctattcacatgccatgtatggctgctatagattaaagaaatatgaaaaggtatccctaacaacatcagccaggcgcggatggagtcgaggaaatattcacgttgcgcgggtactgggttcatatatggttaactaatctcggatttttcgtcttatccctgtcgggttatgcctttaggcttgttgccatagtgacaccgacctgaccgcgccaggcgcaggcttcaaggtttttatgcatagcatcatcgctaccactaaccagaatggaagcgtctgtaagacggttgataaataaatttgctggcaaaccctacacgaagtcgatgcttctgtctttaggagaagcacggaaagtgaaaacggttgcaatcaggtgcttaatccatgagccagcgtgctgaacgataccgggattctgttgtcggaatggctggttatccattaaaatagatcggatcgatataagcacacaaagggggaagtgcttactaattatgaaacataaactacaaatgatgaaaatgcgttggttgagtgctgcagtaatgttaaccctgtatacatctagtagctgggctttcagtattgatgatgtcgcaaagcaagctcaatctttagccgggaaaggctacgagacgcccaaaagcaacttgccctccgttttccgcgatatgaaatacgcggactatcagcagatccagtttaatcatgacaaagcgtactggaacaatctgaagaccccattcaaactcgagttctaccatcagggtatgtacttcgataccccggtcaaaataaatgaagtgactgccaccgcagtcaaacgaatcaaatacagcccggattatttcactttcggcgatgttcagcatgacaaagatacggtaaaagaccttggctttgccggttttaaagtgctttacccgatcaacagcaaagataaaaacgatgaaatcgtcagcatgctcggggccagctatttccgcgtgattggtgcaggtcaggtttatggcctttctgcccgcggcctggcaattgataccgccttgccaagcggtgaagaatttccgcgcttcaaagagttctggatcgagcgtccaaaaccgactgataaacgtttaaccatctatgcattgcttgacagcccgcgtgcgacaggtgcttacaaattcgtggttatgccagggcgtgacacggttgtggatgtgcagagcaaaatctatctgcgcgataaagtcggcaaactgggggttgcaccgttaaccagtatgttcctgtttgggccgaaccaaccgagccctgcaaataactatcgtccggagttgcacgactctaacggtctctctatccatgccggtaatggcgaatggatctggcgtccgttgaataacccgaaacatttagcggtcagcagcttctccatggaaaacccgcaaggctttggtctgttgcagcgcggtcgtgatttctcccgctttgaagatctcgatgatcgttacgatctccgtccaagcgcatgggtgactccgaaaggggagtggggtaaaggcagcgttgagctggtggaaattccaaccaacgatgaaaccaacgataacatcgtcgcttactggacgccggatcagctgccggagccgggtaaagagatgaactttaaatacaccatcaccttcagccgtgatgaagacaaactgcatgcgccagataacgcatgggtgcaacaaacgcgtcgtagtacgggggatgtgaagcagagcaacctgattcgccagcctgacggtactatcgcctttgtggtcgattttaccggcgcagagatgaaaaaactgccagaggataccccggtcacagcgcaaaccagcattggtgataatggtgagatagttgaaagcacggtgcgctataacccggttaccaaaggctggcgtctggtgatgcgtgtgaaagtgaaagatgccaagaaaaccactgaaatgcgtgctgcgctggtgaatgccgatcagacgttgagtgaaacctggagctaccagttacctgccaatgaataagacaactgagtacattgccgaagactgatatccgcgccgttcatcaggcgctggatgccgaacaccgcacctgggcgcgggaggatgattccccgcaaggctcggtaaaggcgcgtctggaacaagcctggccagattcacttgctgatggacagttaattaaagacgacgaagggcgcgatcagctgaaggcgatgccagaagcaaaacgctcctcgatgtttcccgacccgtggcgtaccaacccggtaggccgtttctgggatcgcctgcgtggacgcgatgtcacgccgcgctatctggctcgtttgaccaaagaagagcaggagagcgagcaaaagtggcgtaccgtcggtaccatccgccgttacattctgttgatcctgacgctcgcgcaaactgtcgtcgcgacctggtatatgaagaccattcttccttatcagggttgggcgctgattaatcctatggatatggttggtcaggatttgtgggtttcctttatgcagcttctgccttatatgctgcaaaccggtatcctgatcctctttgcggtactgttctgttgggtgtccgccggattctggacggcgttaatgggcttcctgcaactgcttattggtcgcgataaatacagtatatctgcgtcaacagttggcgatgaaccattaaacccggagcatcgcacggcgttgatcatgcctatctgtaacgaagacgtgaaccgtgtttttgctggcctgcgtgcaacgtgggaatcagtaaaagccaccgggaatgccaaacactttgatgtctacattcttagtgacagttataacccggatatctgcgtcgcagagcaaaaagcctggatggagcttatcgctgaagtcggtggcgaaggtcagattttctatcgccgccgccgtcgccgcgtgaagcgtaaaagcggtaatatcgatgacttctgccgtcgctggggcagccagtacagctacatggtggtgctggatgctgactcggtaatgaccggtgattgtttgtgcgggctggtgcgcctgatggaagccaacccgaacgccgggatcattcagtcgtcgccgaaagcgtccggtatggatacgctgtatgcgcgctgtcagcagttcgcgacccgcgtgtatgggccactgtttacagccggtttgcacttctggcaacttggcgagtcgcactactggggacataacgcgattatccgcgtgaaaccgtttatcgagcactgcgcactggctccgctgccgggcgaaggttcctttgccggttcaatcctgtcacatgacttcgtggaagcggcgttgatgcgccgtgcaggttggggggtctggattgcttacgatctcccgggttcttatgaagaattgccgcctaacttgcttgatgagctaaaacgtgaccgccgatggtgccacggtaacctgatgaacttccgtctgttcctggtgaagggtatgcacccggttcaccgtgcggtgttcctgacgggcgtgatgtcttatctctccgctccgctgtggtttatgttcctcgcgctctctactgcattgcaggtagtgcatgcgttgaccgaaccgcaatacttcctgcaaccacggcagttgttcccagtgtggccgcagtggcgtcctgagctggcgattgcactttttgcttcgaccatggtgctgttgttcctgccgaagttattgagcattttgcttatctggtgcaaaggaacgaaagaatacggcggcttctggcgcgttacattatcgttgctgctggaagtgcttttttccgtgctgctggctccggtacgcatgctgttccatacggtcttcgttgtcagcgcgttccttggctgggaagtggtgtggaattcaccgcagcgtgatgatgactccacttcctggggtgaagcgttcaaacgccacggctcacagctgctgttagggttagtgtgggctgttgggatggcgtggctggatctgcgtttcctgttctggctggcaccgattgtcttctcgttgatcctgtcaccgtttgtttcggtgatttccagccgtgccaccgttggtctgcgcaccaaacgctggaaactgttcctgatcccggaagagtattcgccgccgcaggtgctggttgataccgatcggttccttgagatgaatcgtcaacgctcccttgatgatggctttatgcacgcagtgtttaacccgtcatttaacgctctggcaaccgcaatggcgaccgcgcgtcaccgcgccagtaaggtgctggaaatcgcccgtgaccgccacgttgaacaggcgctgaacgagacgccagagaagctgaatcgcgatcgtcgcctggtgctgctaagcgatccggtgacgatggcccgtctgcatttccgtgtctggaattccccggagagatattcttcatgggtgagttattacgaagggataaagctcaatccactggcattgcgtaaaccggatgcggcttcgcaataaaaacgtagttgcctgatgcgctacgcttatcaggcctacatcgttcctgcaatttattgattttgcaagactttgtgggtcggataaggcgttcacgccgcatccggcaaaaacaacgagccaataaaaataccggcgttatgccggtatttttttacgaaagaggtatcaaatgcgtttaattgtggtgagcatcatggtgaccttgctgagtggctgtggcagcattattagtcgcactataccggggcaggggcatggcaaccaatattatcccggtgtgcaatgggatgtgcgtgactccgcctggcgttatgtcacgatccttgatctgccattctctctggtttttgatactttactgctgccgatcgacattcatcatggcccgtatgagtgattaacgttcatcccactcatcagctgctgcgcgtccttcctcggtatccagcggtggctcaagctgaaattccccctcgtcccattcatgtaatgtattctcttcctgccactcctggcgtatctctatctcatcatagtcgccatcaaaaacactttgcgcggcttcaccgctaagcataggtaaacattcaccttcttccccttcgtcggcaaaaaactcaacttgccacatgatgtcgccgtcctgcaaaacgtatttttgggcattgaactgttgcacattcgcatcttcggcgtcgatgccggggttgtctgcaagaaattcttcgcgtgcagcgtcaatggcttcttcaagcgttgcgtacatggtcatcacgattctccctttgagttgatgaggtttcagggaaaaggatagctgattctccgcttttgcaagtatgaaaggcgaaaaatcagttgcttacctggggtattcgacgacgacgtagactgttccaactatagactgcgttgaataacactacgccagcggtgacgagaaataccgctctgaaaccgtagttcgcactaatcgctgctcccatcaatggtccggtaacgttgccaatatcacgaaagctttggttatagctgaagatacgcccggcgatctggttgctgctgttgtaaaccaacagtgtctgtacggcggggagtagtgcaccatcggcggcaccgagcaaaaaacgtaaaatcccaagttgcaatggcgtctgaacgtaagacattgggatcaacagcagtacagaaaagatcagcgctgtaatcaggatcttttcgggtccgattcgatcgccaagtttgccgagtcgtggtgcacttagcagagccgccacgcctggcacgctggcgatcatgccactgataaaggcgacgttactgacgttacccgccagttcgcggacatacagcgtcagaatgggggcaatactgcccgtcgccacctggatgattaacgtagtgacaaacaggctgagtaccagtttcgggtttttaagacttgtcaccacttcccgcatgtgcagcatctcttttttgctgaccggctggaatttttctctgatgcaaaacagggtgacgaaaaagcagagtatgagcacactggcggtaataaagaataccggacgtaagccgtagctatcggcgagcaggccgccagccattgggccgagcaacgcaccactaacgccgcctgtggagagcgtacccagcgcccagccgcttttattacgcggtacttgtgtggcgataagagcattagcgttggggacaaatccgccaagtaacccaagaagcgcccgcaggatcaaaaactgccagatattttgtgccagccccatcaacaccatcacgatgcccatgccgagggcagagcgtaatagcatgagttttcggcctttacggtcggcgagtccaccccaaaacggactggcgatggcgctaaataaaaatgtaatgctgaagacaataccggaccacatattcagggcggagtgaccggtaacgccaagctgctcaacgtagaggggtaagaagggcattaccagactgaaggcggcaccggtaagaaaacagcctagccaggcgacgatcaggtttcgtttccagtttataggggtgtcattttcacagggactcatagcaatccgctgttggtgcgccaggcgcggtgaacataagaagaaaagataagcacactaattatgcgcccgacttccagggggcgcaatccagagagcttttatcgctaaatcagggggatttgctgtggtaatgccggatgccattctgaagcatccggcatgggagatttaatagcgactaggaacgccttccgggcgtgttttaaagcgacggtgtaaccacatatactgctctggtgccatcatgatgcatttttcgaccactttgttcatccacgcggcggtagtttcggcatcatccagtggcggagaacactctggcggcagcataatcaattgataccctttgccatctggcttacggcgtggaacgaagggcaccagacatgcgccggacatccgtgccagcatccaggttccggtcgtggtcgcagcctgctcaacggcaaacaacgggacgaaaacgctactgcgcgggccgtaatcatgatccggtgcgtaccagaccacttcgccttttttcagggctttaatcatgccttttaaatctttgcggtcgagcatgcttttattactgcgcaaacggccccaggtttgtagccagtcaatcagtggattatcgttcgggcgataaacgccaatacccggttcctgcataccaaactgccgcgcacccagctccagtgtcagaaaatggatgccaactaacaggatgccgcgtttttgcgcctgcacgtcacgaatgtgttccatgccgatcacttccgtccagcgggcgattcggcggtccggccagaaccacgccatgccggtttccatcaggcccatgccaacggattcgaaattcttcaccaccattttacggcgttcttgttcgctcatttccgggaagcacagttccaggttgcgatgcacaatttttgcgcgtcgtttcataaaacgtaacgccagttttcctaatccacaaccgaggcggtagataaccgggtagggcaattgcacgactaaccaaagtacgccaatacccaaccaggttaaccaataacgcggatgaagcagtgcggtggagaacttgggtagattcgtcatatcaatcctgtttttcaacctattcgggcaattgtatgtattgtcgcattttttcgcccgcaaccaaaatttgtggctgaagactgggcgaaattgccgcgcttgtaaataacaaataatttttaatgcgcaaatgtagcgtaaaatgtgtggatgttaattatcgataattgctatatcatgccgcggatttttactttcccatctcgcaggaaccgtacaccatgccagtgttacacaaccgcatttccaacgacgcgctaaaagccaaaatgttggctgagagcgaaccgcgaaccaccattagcttttacaagtatttccacatcgccgatcctaaggcgacccgtgacgctttatatcagctgtttaccgcgctgaatgtttttgggcgagtgtatctggcgcatgagggcattaacgcgcaaatcagcgtacctgcgagcaatgttgaaacatttcgcgcgcagctctatgccttcgacccggctttagagggtttacgcctgaatatcgcgttggatgatgacgggaaatccttctgggtactgcgcatgaaggtacgcgatcgcattgttgccgacggtattgacgatcctcactttgatgccagcaatgttggtgagtatctgcaagcggcggaagtgaacgccatgcttgacgatcccgatgcactatttatcgacatgcgtaaccactatgagtatgaagtggggcactttgaaaacgcgctcgaaattccggcagataccttccgtgagcagctgccaaaagcagtcgagatgatgcaggcacataaagataaaaaaatcgtcatgtactgcaccggcggcattcgttgtgaaaaggccagtgcctggatgaaacataacggattcaacaaagtctggcatatcgagggcggaattattgaatacgcccgtaaggcgcgcgagcagggcttgccggtgcgttttattggcaaaaattttgtttttgacgagcggatgggcgaacgtataagcgatgagattatcgcgcattgccaccagtgcggcgcgccgtgcgacagccataccaactgtaaaaatgatggctgccacctgctgtttattcagtgtccagtatgcgcggaaaaatacaaaggttgttgtagtgagatttgctgcgaagaaagcgcgttaccgccagaagaacagcgacgccgtcgggcaggacgtgaaaatggcaataagatctttaataagtctcgtggacgtctgaatacaacactgtgcattcctgatccaacagaataaatatcattgccggatgcgtgccatccggcaacatttcacgcttacttctgctgtacgccttccacactaataatcagatccacttcctgagaagctggacctaaatctgtcttgatattgaagtccttgagcttaattttgccttcggcctcgaagcctgcacgtttaccaccccatgggtcgtcgccctgaccaattaatttcgcttccagcgtgacgggtttggttacgccattcagcgtcagatcgccggtaatatccagttcgtcaccgtctttcttcacgctggtggaggtgaatgttgcctgtggatattttgcggtattgaggaaatctgcactgcgaagatgtttatcgcgttcggcgtgattagtatcgacgctggtggtgttaattgtcacattcactttatcggcagccggatttttttcgtcaaaggtaaaagtaccgtcgaaatctttaaaggtgccgtataaccagctatagccaaggtgctggatgcggaaattaacaaaggcgtgctgaccttctttgtcaattttgtaatcggcggcaaccgcactaccggcagagaacatcagggacgcgaaggttaaaccaagcaggctttttttcattttttatactccatagtcagaactgctctttcccagcatgcgcttcagagtgtcgtctttatcgatgaaatgatgcttcagggccataaatccgtgcataacggacagtactacgacgctccacgcgagccaaaaatgcagggcaccggcaaagtctgcctgtgcgccagcgtcggcaagggtcgcggggacgtcaaaccagccaaaaacgctgatcggtttaccatcggcagtactgatcagatagccgctgatgccgatggcgaaaagcaataggtacaatgcgagatgtccagctcttgcggcaagacgagtcatggggctataactcggcagcggacccggcggtggagatatgacacgccacagaacgcgaataaccagccccatcattaacaaaataccgatgcttttatgcagttcgggtgctttgtgataccagccatcgtaataactgagcgtgaccatccacagacctaaagcaaacatgccgtagacaataattgcgcttagccaatggaaggccgcagatataacaccatagcgttcaggggtatttgtgaaactcataagtgcatccaaaacgaatttgcgagagaaagaaaatggcgtgtcggagaatgaattgcaacacaaaaataacaaattgaatgatatttatttttatttcaataattttgaattaataatgaaagaatcttcataagtttagtgggttcagcatcagagatgtctggtgagtgctgtagaagcaggaataatctcattcaatttttcacgctaaatgaaagggagattaaatatttgtcagtttatgtcagtgcggaaaattaaaaataaaacacatagatcagatccataattgccaacaatccccagagaaaaagataaagcatcagatgctcgcgaatattattgatgagatagtgcaacagccgacgcattaaatactcctgtaaaaacggcctcattctggaggccgtaatgatgattattggaagcgggaaagcctgaatggcgtcaaatcaaaatcgctttttttgtcttgcgcaaaatcggcagctatttcccctaaaacactcgcaaatttaaaaccgtgcccactcaggccggtaatgagcagtgtattatcgtggccgggtagggtatcgataataaaatcttcgtcagggctattatcataggtgcaggcagcgccgtacaggcagcaaccgatacccggcaatacattgcgcaagaacgggaaggcttcactcccatcactggccacttccgcaaacggaacacgttcatccgcactatggataacctggcctccgttatgtttgccaatcttcaacgcgtcgttttctgccggaaaaccataatattgatcgccattgggcagttcaccggtaaacgccgggaatttattcttcacgctatagcggccatcggcctgataccaggcaaatactttgcgtacgggctggacaggcagctccgggagcaggtcttttacccatgttcccgcgcagacaatcgcttttttcgcctgatactcaccgtcagccgtttcaatagttacgccatcatcgtcatgacgaattgcggtgaccgggcagttgaacagttgcgcacagcccgcttccttcgccagttggatccaggttttaatcgccagttcgctgcgcaaaaaaccggaatcagtttcaaataagccgatgtagttgtccgggacgcgtatttccggccagcgggccataatcccttgcgcatcgagcttttcaacgttgagttgccattgttcggcgctgtgggcgacgttggcgagaaatgtggaatcagccgggccaaggttaatgacgccagagcgtacaaaaatgggatcttcttcgttgtggcgggagagttcatcccacagcgtttgcgcgcggaggaccagcgggacatacttttcgccttcaccataagcatggcgaattaatcgcgtatcgccgtggtggctgccgtgttgatgcggtggcatatgggcgtcggtcattagcacgtttaaaccggcgcgggttgcataatacccggcggcagcgcctacggaaccgctgccaataatgatgagatcgtatttcatttttttctctctgctctcatggtttaagcagagtaattaactgaatgcagatatacaacccagaaatggtaaaggcaccggtgaggtgccttttgggtggatggtcatgtcatgttaatgacgccgatactcgtttacctggaaatcaccggattcaattttggcgattcctgcttctaatatgctaataaattgtctggcaacatcagtggttaaccagagcgtctgaccaacttcagtcccttcctgctcggacttatttggggtctggtagtgcaaacgcaacatcagcgcatcatagctatcaacggtgctgatgtcccaccctacgagcggatgagtctgaatgacttcattatttttttccatcatggccccctaattcgtgttactagacaacgttattcgaggttcaatgcgtttttatctgaagcaacttcagtataccaataagtaagggtattcaccgaatttttaaagggggaaacagataaatttctgcttttaagatttatatgaacaataaaacagcatgtcattcatatttttttagcatattgtgcaattattttgaggaagtgtagaaattttgtactcaaaattcgtaagtaaaataaaaaagccggggcgacccggcaaaaaaaatcactgcatattattcgctgacaaaccagtcatcggcgctttcccacgtttcctggagaatttcactaatgcgctgtttatcttcttttgtcgcgccaataacgcttaaattattcgctgcggcataacgtacgcttacgtggccttcattatcaggaaacgcatactgaatacggcgggaaagttcgccagccagggcgtcaatagccccagctggcaatggagaagttttcgctatggtgacttcaattcgcataatagccccctgttgaatatactggttatttatacaggtaaaataacctaatgacaacaggaagctacgatttttattgtttaacggaccagcgtaccgtttccccggcgaggaatggcaccagcgtgtcatcagtcagtgcgatgctttcagcaacctgttgctcttcacgtaccagttcgatgaatgtgtcgttgaccggcaacccatagaactgcgggccgtttacagaacagaatgcttcaaagtgctgcaaagcattcatttcttcaaagacggtagcgtaactgcccagcgcggttggggcgttgaagcagcccgcgcagccgcaactgctctctttgcgatgacgtgcatgtggcgcagaatccgtaccgaggaatactcgattaaaaccgctggcgaccagttcacgcaatgcctgttggtgaatattacgtttgaggatgggtagacaatacaggtgcggacgcacgcctccaaccagcatatggttgcggttaaacatcagatgctgcggagtgatggtggcagccagccgttcatttccgtcacggacatagtcggcagcatctttggtggtgatgtgctcaaaaacgactttcagcgcagtcaggcgctggcgcagaggttccatcacgctttctataaagcgcgcttcacgatcaaaaatgtcgatatctgcatgtgtcacttcaccatgcaccagtagcggcataccgattttttccatgcgctcaagtaccggcatgattgcgtcaatactcgtcacgccgtggctggagttagtggttgcgtttgccgggtaaagttttgcagcggtgaacacgccttcgttaaatccgcgctccagctcattaggatccaggctatctgttaaataacaggtcatcaatggggtgaaatcgtgcccggcaggtacggcgtcaagaatacgctggcgatacgccacggcagcctcaacggtggtcacgggcggagccagattgggcattacgatagcccgtccataaatttcgctggtatatggcacgacagtttttaacatgtcgccatcgcggaggtgaaggtgccagtcgtctgggcggcggatctttaatacctgggatggtgcagtcattaatctctatgctccggctgaagggatgtttttgccggacacaaaggataagcggaaacgttttcctttgcacgaaaaataaagggcgcgaatgcgccctcgtgattaatcagtaaatggaatgacaatttcgcctggcttcacttcaatgcctttcgccagttttttcgccattgcttcgccctggctgccatcttcgcgcaggacgtaagcaggttgctggttaaagtaattgcgtaatgcctggttcaaatagggaagcaacgtttgcatcaccgtttgcattttttccggttgtaccgtcgcatcgaccacttccatctctttcaggaagatcgcacctttttctttatcaaacacgggcagcgctttcagcttcagtttcatggtcgctttctgactaccgaacagggagttcatgtccagattggcgtctccggttagggtaaccttattcggctcttcgcgaccaatttggctggtcaggtttgtcagaacaatatgggcgtcagccacgccgggtaaaccgatatctttactgaaattattatgtttcgcaaggctctggttaatttcttgttcggtgatggtgtattgggtgagttgattacagccaacgagcaggccactgacgatcaatgcagcggcaaataaaaacttgttcatggtagtcctcgacatgaaatctgcgtcaatatcctgacacaacgcagcatgtgtcaccagcgataaactcgccagcagaaaaaactgaaaacggcggcaacccgcgaatacaggctgccgcggcgggtcaggattaaatcgccatactacttaacaaattgatttgtgtctgtttcgccatattatcgcggtaatcagcaacgcggcttggccagttaattccggctaccagcgtcagattacgcagtagcgggaatagctgaatatcatcttcgctaagttcgccattcacggcgttcggtttgacgatcagtttgtccagcgcacgtaaatcatcgctgatattcttaatcagaccgtcagagtgggccagcaggtcggcaaaattacccgcgctggcctctttcttgtcgacgaaatatttgcgcgcggcgggagtagaaaactcatcaaatgcgcttttggcaaaacgcggcaacagcagtttgttggcgtagccattgaccttgcgcagccactcttcaatggcaggggaacgtttgccggtcagtaacggtttgccgtcgagtttatcgacatagtgaacgatgtccatgctttctggcatatagcggctgtcatctttttgcagaatgggaacctgtttttgaccgaccatccgggtgggtgtttctgcgtcgtcgttgagcagaacatgtaattcgacggggatatttttcaggccgaaaatcatgcgggctttgaggcagtaagggcagtgatcgtaaatgtatagcttcacgtgactcctccatttggctgtcagttcactttcagtatgaaggagtcaggggggagtatcaaatcaggcgtcgcgttcaagcaaacgacgcgcggcgcgtttctggctaaactgccaacccagcgcaaggaaagtgaagatgccaataatgcccagcatcatccacggaagctctggctggtgcgcgcttttgcccaggtcaaacagccagccgccaccgatataaccaatagcgccgccaatcgccagacccagacggctaaaccccatatagctgccgcgagctcttgcgtccgccaggctagcacttaaggtttcacgcgcaggctcggcaatgatgctcccgatataaaacagacaaatcagggtgaaaagttgttgcaggccgctgaccatgcccaccggcatcatgcttaaactcattatcaacagcccagccatcaaccggtgttccagacgaaaatgcttttcactccagcgggcgatagggtagagcaacgttaagctcagacacgcttcaatggcatacatccatttaacggcagagggcgcgcagccacgtcgttgaccataattggcagcatcagcatcacttgtacagccagcatgtagtaacccgccagcgtcagaacataggtgacaaaacgcttgtcacgcatcacgcgggtcatgccttcgcgaacgggcgtgcgtacggtggagagtttccatgctggtaacaaccacgcattgaacgccgcacatagcacaaatagaactgcccctgtggcgcagaccaggcgaaagtcgtattgcaacagccagctccccaacaatgcgccaatgaccgcaccggcactgtcctgcatcatcaacaggctgaaaaaacgaccacgctgctgtggacggattaatttcaccaccagcgcgctacgcggcggatcaaacaacgtgccaccgagtccgctgagcaggcaactaaaccacaatagccacggttcgtgggcgatacccattgtggcgaatccggcggcgcgcatcagcataccggtaacaatcatcggtttggcaccaaagcggtcggcaattgcaccgccgaaaatacccagaccttgctgaataaattggcgtagaccgagagcaataccgaccatgacggcggcccagcccatttgatcaacgaagcggatagagatcagcgggaagacaacaaagaaccccagcacgaccagcatattatcgatgagcaggaaatatttacccaggttcctcgcctggctcacgcgggacatttcccctcccgggaaataaaagatgagcactttctattctgcattgccgctaagacttttcccatcacttcggggacaatatttttttatcaaaacgtcgctttgatagagagtttttatcaaatatgtgaataatgcagaaaatggcattttggacttttcacagggtctggttgcgcaggtatagtaatacttacagcgtattaaagacgttacgggaaggagtaggtatagaatgtttggctatcgcagtaacgtgccaaaagtgcgcttaaccacagaccgactggtcgtgcgtctggtgcatgatcgtgatgcctggcgtcttgcggattattacgcagagaatcgccatttcctcaagccctgggagccagtgcgcgacgaaagccactgttatccaagtggctggcaggccaggctggggatgattaacgaatttcataaacaaggtagtgctttctactttggcttattcgacccggacgaaaaagagattattggcgttgccaatttttccaatgttgttcgtggctcttttcatgcctgctatctcggttatagcattgggcaaaaatggcagggcaaaggactcatgtttgaagccctgaccgcagccattcgttatatgcagcgcacccaacatattcatcgcattatggctaattatatgccgcacaataaacgcagcggtgatttactggcgcgactgggttttgaaaaagaaggctatgcgaaagactatctgttgattgatggacaatggcgcgatcacgtactgacggcattaactaccccagactggacgcccggccgctaaggagaatctcatgaaatatcaacttactgcccttgaagctcgcgtgattggttgcttgctggaaaagcaggtgaccacgccggagcaatacccgctcagtgtcaatggtgtagtcacggcctgtaatcagaaaacgaaccgtgaaccggtcatgaatctgagtgaatccgaagtgcaggaacagctggataatctggtcaaacgtcattatctacgcacagtgagcggttttggtaatcgggtcaccaaatatgagcaacgtttttgtaatagtgaatttggcgatctgaaactgagcgcagcggaagtggcgttaatcaccacgttgttattgcgtggtgcccagacgccaggtgaactgcgcagccgcgccgcgcgaatgtatgaattcagcgatatggcggaagtggagagcacgctggaacaactggcaaatcgcgaagatggtccttttgtggtgcgtctggcccgcgaaccgggtaaacgcgaaaaccgctacatgcatcttttcagtggtgaggttgaagatcagccggcggtgacggatatgagcaacgcggttgacggtgatttacaggcccgcgtcgaagccctggaaatcgaagtggcagaactgaaacagcgtcttgatagcttgctggcccatctgggagattaaagtgaaaaaattacgtatcggcgtagtgggattaggtggcattgcgcaaaaagcgtggttaccggtgctggcggcagcgtctgactggacgttacaaggagcctggagccctacgcgcgcgaaagccctgccaatttgtgaaagctggcgcattccttatgccgatagcttatccagccttgccgccagttgcgatgcggtttttgtgcattccagcaccgccagccactttgacgtggtcagtacgttactcaatgcgggggtacatgtctgtgtcgataaaccgctggcagaaaatctgcgcgatgctgaacggctggtggaactggcggcgcggaaaaaactgacgttgatggtcggttttaaccgtcgtttcgcaccactctacggtgagttaaaaacgcaactcgccaccgcagccagcctaagaatggataaacatcgtagcaatagcgtcgggccacacgatctttatttcacgttgctggatgattatctgcatgtggtggataccgcgctgtggttgagcggcggcaaagcctctctggatggcggtacgctactgactaacgacgctggcgaaatgctgtttgccgagcaccattttagcgctggtcctttgcagatcaccacctgtatgcatcgccgtgccggaagtcagcgtgaaaccgtgcaggccgtgactgacggtgcgctcatcgacattacggatatgcgcgaatggcgtgaggagcgcgggcagggcgtagtgcataaaccgattcctggttggcagagtacgcttgagcaacgtgggtttgtcggctgtgcgcggcacttcattgaatgtgtgcaaaaccagacagttccgcaaaccgccggcgaacaggccgtgctggcgcaacgtatcgttgacaagatctggcgcgatgcgatgagtgaataaaccctgtaacatctggcggtagcaattcaccataatccaggtagactattcgcctctttcagcgcctgccttgcaggcgttttgcccgtgggtctggattagaacaccgatgaatttattaaaaagcctggccgccgtcagcagcatgaccatgtttagccgtgtgcttggcttcgcacgagacgcaattgtcgccagaatctttggcgcagggatggcaaccgacgcctttttcgtcgcttttaaacttcctaacttgttacgccgtatctttgccgaaggggcattttcccaggcatttgtaccgattctggcggaatataaaagtaagcagggtgaagacgccacgcgggtctttgtctcttatgtttctggcctgctgacacttgcgctggcggttgtgacggtcgctggcatgctcgccgcaccgtgggtgatcatggtgaccgcgccaggcttcgctgacacagctgacaaatttgccctgaccagccagctactaaagattacctttccctatatcttgctgatctccctggcgagcctggtgggagcgattctgaatacgtggaaccgcttcagcattccggcgtttgctccaacactgcttaacatcagcatgattggtttcgcgctgtttgccgcaccgtactttaacccaccggtgctggcgctggcgtgggctgttacggtcggcggcgtcctgcagctggtgtatcagctaccgcacctgaagaagatcggcatgctggtcctgccgcgcattaacttccacgatgccggagcaatgcgcgtggtgaaacagatgggaccggcgatccttggcgtctctgtgagccagatctccttaatcatcaacaccatttttgccagctttcttgcttccggtagcgtgtcttggatgtattacgccgaccgcttaatggagtttccgtccggtgtgctgggcgtggcgcttggcaccattttgctgccgagcctgagcaaaagttttgccagtggcaatcatgatgaatacaaccgtttgatggactgggggttgcgtctttgtttcctgttggcgctgccgagtgcggttgcgttgggcattctttccggtccgttgaccgttagcctgttccagtacggtaaatttaccgcgtttgatgcgctgatgacccagcgggcgttaattgcctacagcgtgggtttgattggcctgattgtagtgaaagtgttggctcctggcttttattcccgccaggacattaaaacgccagtgaaaattgccatcgttacgctgattttaacgcaattgatgaacctggcgtttattggtccgttgaaacatgccgggctgagtctttctattggtctggcggcgtgtctgaatgctagcctgctttactggcagttgcgtaagcagaaaatctttaccccgcaacccggctggatggcgtttctgttgcgtctggtggtggcggtactggtgatgtctggcgtgcttttaggtatgttacatatcatgccggagtggagtttgggtaccatgccctggcgtttactgcgtttaatggcggtcgtgctggcggggattgccgcgtacttcgctgcactggcggtactgggcttcaaagttaaagaatttgcccgccggacggtgtaacaatgcattccggcctgcagtgttcgctttaaaacatatcatgaaactgggtatgttttgtctgcctgctctgggatcgctggggcgggcatttttttgcctattttgcattgttggttagcaaggatgccattcgatgaattttaatatgttgattcaaagatgaaataaaaaagccctggcagttaccagggcttgattactttgagctaattattactcaacaggttgcggacgcgcaggagcggcagaggcatgatgtgttgccgtatgaccacctgcggcacctttaccttcgaaggcaaaagtagggcgctgccagtcactgtgacgcggtgcctccggaacatattccggtgctggagcgcgcgtcattggcgcggtagcgtggttatgctcaacggtgacctcaggttcgaccgcagctaccgtttcaacttctgctgcgacttcagcgactactggcgcggcaggttgagcaacaacttcaggttcagcaactacaacctcagcagtttcgacaacttcttcaatatctgccgtctcttcctgcggttcaaccaccggttctgcttgttctgcaacttcctgggctacggcaacatcagactcggtaatcacctgcggctgttcagttaccgcggcagcgatcacttcaggatgcgtcgtttcaaccacttccggttgcggttcggcaacctgaacgggggcttctacgacaccggccacttcttcaacaactggcgcgctaacaaccggttcgatagcggcggcgacagggacctcagtcaccatcggctgcacatgtacttcttcctgttcgcgctgctcttcaacctgtacatcttgcggacgtacaattggatagcggatccagactttgccagaggccagttccggagacgcgcacgctacggtcaacggcattgggctctgggttggataacgctcgtcacgatagcgacgacgacgctgaccacttacgcgcaggtgacgagggctgcggcgagaacgacgcggcatgccaccgttgtcacggttatcagcattgttctcttcttgctgttctggtgcagtttgcgctacgactggcagcgggactttcaccagttctgtgcgtggagctggcgcttcctgaacaattggttcggcagcgacagtttcttcaaccaccggtgcgactaccgcttcttcggctacgctttgctcgtaacgcactttctgattgagctgacgctgtttacgacgcggctgaaccggacgtacacgttcttcctgttcggtttcctgaacagattgctcttcaacattcagcgccttcgcttcttgttgcgcctgacgtttatcatcattacggcggcggctacgttcacgacgcggcgcttgctgctcgtcggcggtacgcgctttttccgttacctcagcctgctgacggctctcacgcgtctcggcagtctgctgctgtgcctggcgacgattacgacggttttcttcgcgattatcgctgccttcagtacgttcactacgggtgtcgcggcgctcattacggtcacggcggttgttctgacgaggcttgcgacgatcctgttgacgttccggtttcgcttctgctttcggtgctggttgctcggtcggtttggtttcttcaccaccgctgaacagcgctttcagtgcgccgaagaagcggctcaacagcccaggttgtgcaggagctgctggtgttgccggtgcagctttcggtgctggagctacaacaggcgcggcaggttcagctggcgttggcgcaggcggcacatccggcatggcaaaggttgccagcgcaggttgttccggacgcttacgttcagcgaactcttcttcagacggcagcgccatcgcttcttcatgcagcttcggcagcatgtagcttaaggttggggtttcttcccctttacgcacgcgcagcacgtggtagtgcggggtttccatctgatcgtttggcacaattacacagcgcacaccgtcctgacgagtttcaatggcatttaccgcagaacgtttttcattcagcaggtaagaagcgattggcacaggaacaatggcgtgaacttcctgggtgttctctttcagcgcttcttcttcgatcagacgcagaatagagaggctcaggctttcgttgtcacgcacggtgccagtaccagaacaacgcggacaaacgtgatgactggattcacccagacttgggctcaggcgctgacgggacatttccagcaggccaaagcgagaaatatggctgatttgaatacgcgcacggtcctgacgcaccgcttcacgcagacggttttctaccgcacgctggtggcgtactggcgtcatgtcgatgaagtcgataacaatcaggccgccgaggtcacgcaggcgcagctgacgagcaatctcatcggcagcttcgaggttagtgttaaacgcggtttcttcgatatcgccgccgcgggtcgcgcgtgcggagttgatgtcgatggccgttaacgcttcggtgctgtcgataacaatggaaccaccagacggcagacgaacttcacgctggaaggcggactcgatctgactctcgatctggtagtggctgaacagcgggatctcgccggtgtacagtttgattttgctgctgaaatccgggcgacctaatgcagcgatatgctgacgtgccagttcgagcactttcgggttatcgataaggatttcgccgatgtcctgacgtaagtaatcgcggaatgcgcgaacgattacgttgctctcctgatgaatcaggaacggggccgggcggctttcagcggcttttttgatggcttcccagtgtttcagacggaagcttaaatcccattgcagcgcctcagcagatttgccgacgccagcggtgcgcacgataagccccatgccttccggcagttcaaggcttgccagtgcttcttttaattcggtacggtcgtcgccttcgatacggcgagaaatgccacccgcgcgcgggttgttcggcatcagaaccagatagctacccgccagactgataaaggtggttaatgccgcgcctttgttgccgcgctcttctttatcgatctgaacaatgacttcctgaccttcacgcaacacatctttaatgttgggacgaccatgagcactgtagttagcagggaaatattcgcgggcaatttcttttagtgggaggaaaccgtgacgttcagcgccgtaatcaacaaaagcagcttccagactcggttcaatgcgggtgattttacctttgtagatgtttgcctttttctgctcgtgccctggactttcgatatccaggtcatacagacgctgcccatctacaagggcaacgcgcaactcttcctgctgagttgcgttgattaacattcttttcatcgtaacttactcattattcttacattgacgactaagctgcgggcaaagtaacgcctttccgggtgtgaaccgatggcctcgtgtctagtcgcgtcgccaacctcacggttatcgtcagctcaaagaggcgcagagtgtgagttgcccgtttttcatgcggaaaaacagcgcaattatcaaagaaacagactgggtattactctccagaaatatttccatctaccggtaaggactgcaacccgcagcccgctaactgcctgaaagatcaatacgtcttacgccattgctgcgtggatgatcggtcgggcaaaatgggttattccgtaaaatttcttgttttaacaaggatggacacggaaacggcctcattattccactgcaagccttgttatagcaagatgacttttaccatttatcacccgcttactcacagttttttcacttcttgctggtgattggtttaataaccatcaataaagtgatcacgcagtgaagtaataaggtgcaaaagtaaatataagcatagaaaaatgagtggcgcgaatcctgttggctaattagaatcgccaaccatgaaaacagagactccatccgtaaaaattgttgctatcaccgctgacgaagcggggcaacgtatcgataactttttgcgtacccaattgaaaggcgtaccaaaaagtatgatttaccgtattttgcgtaaaggcgaagtgcgggtgaacaaaaaacgtattaagcctgaatataaactcgaagcgggtgatgaggtgcgtattccaccggttcgcgttgctgagcgggaagaagaggcggttagcccacatctgcaaaaggtggcggcgctggcggacgtcatcttatatgaagatgatcacatcctggtgctgaataaaccttccggtacggcggtacatggcggcagtggtttaagcttcggcgttattgaaggtttgcgggcgttgcgcccggaagcgcggttccttgaactggttcatcgtcttgaccgggacaccagtggtgttttgctggtagcgaaaaaacgcagcgcgttgcgttctctgcatgagcaattacgtgaaaaagggatgcaaaaagattacctggcgctggtgcgcggtcagtggcagagccatgtgaagagcgttcaagcaccgttactgaaaaatattctgcaaagcggcgaacgtatcgtgcgtgtgagtcaggaaggcaaaccgagcgaaacacgctttaaagtggaagaacgctatgcatttgccaccctggtgcgttgtagcccggtaacagggcgtactcaccagatccgtgtgcatacacaatatgcgggtcatccgattgcctttgacgatcgctacggtgaccgtgaatttgacaggcagctcactgaagcaggcacgggattaaatcgcctgttcctgcacgctgcagcgttgaagtttactcatccggggaccggtgaggtgatgcgtatcgaagctccgatggatgaaggtttgaagcgttgtttgcaaaagctgcgtaacgcgcgctaatacaagcatataaacctgataatgggcggttggcctgataaggcgtttacgccgcatcaggccgccagcaccgattgccggatgcgacgtaaccacatccggcgcaaaaaattatcccatcagcgggtttttcccttcccgacgtaacatctgacacagcgcgattagcggtaaaccaaccagcgtgttaggatcacgcccctctaaacgctcaaacagcgtaatgccaaatccttcactcttaaagctacccgcgcagtgcaggggatgctctttacgcacgtaattatcaatctccgcctcgctcaggtgacggaaatggacgtcaaaaggctccacttctgtttgcagatgcccattcgcgctattaaacaacgccagtccagtatagaaggtgacgatattgccgctggctttgcgtaattgcagacgggcattttcttccgttaacggtttaccggtgatttcgccatcaagaacacatacctggtcactaccaataattaaatgatccggataacgactcgccagagattgcgctttttcttgtgccagtcgaagcaccaactgtcgcggactttcgtcgctgcgtggggtttcgtcgacctctggtgctgcacattcaaaagagatttgcagtttttccagaagagcgcgacgccatgggctggtggaggctaaaataagtttaggcatatttttttccatcagatatagcgtattgatgatagccattttaaactatgcgcttcgttttgcaggttgatgtttgttatcagcactgaacgaaaataaagcagtaacccgcaatgtgtgcgaattattggcaaaaggcaaccacaggctgcctttttctttgactctatgacgttacaaagttaatatgcgcgccctatgcaaaaggtaaaattacccctgactctcgatccggttcgtacggctcaaaaacgccttgattaccagggtatctatacccctgatcaggttgagcgcgtcgccgaatccgtagtcagtgtggacagtgatgtggaatgctccatgagcttcgctatcgataaccaacgtctcgcagtgttaaacggcgatgcgaaggtgacggtaacgctcgagtgtcagcgttgcgggaagccgtttactcatcaggtctacacaacgtattgttttagtcctgtgcgtagtgacgaacaggctgaagcactgccggaagcgtatgaaccgattgaggttaacgaattcggtgaaatcgatctgcttgcaatggttgaagatgaaatcatcctcgccttgccggtagttccggtgcatgattctgaacactgtgaagtgtccgaagcggacatggtctttggtgaactgcctgaagaagcgcaaaagccaaacccatttgccgtattagccagcttaaagcgtaagtaattggtgctccccgttggatcggggataaaccgtaattgaggagtaaggtccatggccgtacaacagaataaaccaacccgttccaaacgtggcatgcgtcgttcccatgacgcgctgaccgcagtcaccagcctgtctgtagacaaaacttctggtgaaaaacacctgcgtcaccacatcactgccgacggttactaccgcggccgcaaggtcatcgctaagtaatcacgcatctgcgtgatgaagcttagtgaggattttccccaggcaactggggaaagaccaaaccgggcggcgacgataccttgacacgtctaaccctggcgttagatgtcatgggaggggattttggcccttccgtgacagtgcctgcagcattgcaggcactgaattctaatagccaactcactcttcttttagtcggcaattccgacgccatcacgccattacttgctaaagctgactttgaacaacgtagccgtctgcagattattcctgcgcagagtgttatcgccagtgatgcccggcctagccaagctatccgcgccagtcgtgggagtagtatgcgcgtggccctggagctggtgaaagaaggtcgagcgcaagcctgtgtcagtgccggtaataccggggcgctgatggggctggcaaaattattactcaagcccctggaggggattgagcgtccggcgctggtgacggtattaccacatcagcaaaagggcaaaacggtggtccttgacttaggggccaacgtcgattgtgacagcacaatgctggtgcaatttgccattatgggcagtgttctggctgaagaggtggtggaaattcccaatcctcgcgtggcgttgctcaatattggtgaagaagaagtaaagggtctcgacagtattcgggatgccagtgcggtgcttaaaacaatcccttctatcaattatatcggctatcttgaagccaatgagttgttaactggcaagacagatgtgctggtttgtgacggctttacaggaaatgtcacattaaagacgatggaaggtgttgtcaggatgttcctttctctgctgaaatctcagggtgaagggaaaaaacggagctggtggctactgttattaaagcgttggctacaaaagagcctgacgaggcgattcagtcacctcaaccccgaccagtataacggcgcctgtctgttaggattgcgcggcacggtgataaaaagtcatggtgcagccaatcagcgagcttttgcggtcgcgattgaacaggcagtgcaggcggtgcagcgacaagttcctcagcgaattgccgctcgcctggaatctgtatacccagctggttttgagctgctggacggtggcaaaagcggaactctgcggtaacaggacgctgccagcgaactcgcagtttgcaagtgacggtatataaccgaaaagtgactgagcgtacatgtatacgaagattattggtactggcagctatctgcccgaacaagtgcggacaaacgccgatttggaaaaaatggtggacacctctgacgagtggattgtcactcgtaccggtatccgcgaacgccacattgccgcgccaaacgaaaccgttagtaccatgggctttgaagcggcgacacgcgcaattgagatggcgggcattgagaaagaccagattggcctgatcgttgtggcaacgacttctgctacgcacgctttcccgagcgcagcttgtcagattcaaagcatgttgggcattaaaggttgcccggcatttgacgttgcagcagcctgcgcaggtttcacctatgcattaagcgtagccgatcaatacgtgaaatctggggcggtgaagtatgctctggtcgtcggttccgatgtactggcgcgcacctgcgatccaaccgatcgtgggactattattatttttggcgatggcgcgggcgctgcggtgctggctgcctctgaagagccgggaatcatttccacccatctgcatgccgacggtagttatggtgaattgctgacgctgccaaacgccgaccgcgtgaatccagagaatagtattcatctgacgatggcgggcaacgaagtcttcaaggttgcggtaacggaactggcgcacatcgttgatgagacgctggcggcgaataatcttgaccgttctcaactggactggctggttccgcatcaggctaacctgcgtattatcagtgcaacggcgaaaaaactcggtatgtctatggataatgtcgtggtgacgctggatcgccacggtaatacctctgcggcctctgtcccgtgcgcgctggatgaagctgtacgcgacgggcgcattaagccggggcagttggttctgcttgaagcctttggcggtggattcacctggggctccgcgctggttcgtttctaagataaggattaaaacatgacgcaatttgcatttgtgttccctggacagggttctcaaaccgttggaatgctggctgatatggcggcgagctatccaattgtcgaagaaacgtttgctgaagcttctgcggcgctgggctacgacctgtgggcgctgacccagcaggggccagctgaagaactgaataaaacctggcaaactcagcctgcgctgttgactgcatctgttgcgctgtatcgcgtatggcagcagcagggcggtaaagcaccggcaatgatggccggtcacagcctgggggaatactccgcgctggtttgcgctggtgtgattgatttcgctgatgcggtgcgtctggttgagatgcgcggcaagttcatgcaagaagccgtaccggaaggcacgggcgctatggcggcaatcatcggtctggatgatgcgtctattgcgaaagcgtgtgaagaagctgcagaaggtcaggtcgtttctccggtaaactttaactctccgggacaggtggttattgccggtcataaagaagcggttgagcgtgctggcgctgcctgtaaagcggcgggcgcaaaacgcgcgctgccgttaccagtgagcgtaccgtctcactgtgcgctgatgaaaccagcagccgacaaactggcagtagaattagcgaaaatcacctttaacgcaccaacagttcctgttgtgaataacgttgatgtgaaatgcgaaaccaatggtgatgccatccgtgacgcactggtacgtcagttgtataacccggttcagtggacgaagtctgttgagtacatggcagcgcaaggcgtagaacatctctatgaagtcggcccgggcaaagtgcttactggcctgacgaaacgcattgtcgacaccctgaccgccagcgcgctgaacgaacctagtgcgatggcagcggcgctcgagctttaaaagaggaaaatcatgaattttgaaggaaaaatcgcactggtaaccggtgcaagccgcggaattggccgcgcaattgctgaaacgctcgcagcccgtggcgcgaaagttattggcactgcgaccagtgaaaatggcgctcaggcgatcagtgattatttaggtgccaacggcaaaggtctgatgttgaatgtgaccgacccggcatctatcgaatctgttctggaaaaaattcgcgcagaatttggtgaagtggatatcctggtcaataatgccggtatcactcgtgataacctgttaatgcgaatgaaagatgaagagtggaacgatattatcgaaaccaaccttagttctgttttccgtctgagtaaagcggtaatgcgcgctatgatgaaaaagcgtcatggtcgtattatcactatcggttctgtggttggtaccatgggaaatggcggtcaggccaactacgctgcggcgaaagcgggcttgatcggcttcagtaaaagtctggcgcgcgaagttgcgagtcgcggtattactgtaaacgttgttgctccgggctttattgaaacggacatgacacgtgcgctgagcgatgaccagcgtgcgggtatcctggcgcaggttcctgcgggtcgcctcggcggcgcacaggaaatcgccaacgcggttgcattcctggcatccgacgaagcagcttacatcacgggtgaaactttgcatgtgaacggcgggatgtacatggtctgaccgcgatttgcacaaaatgctcatgttgcgcgcagtctgcgtggttatgagtaataattagtgcaaaatgatttgcgttattggggggtaaggcctcaaaataacgtaaaatcgtggtaagacctgccgggatttagttgcaaatttttcaacattttatacactacgaaaaccatcgcgaaagcgagttttgataggaaatttaagagtatgagcactatcgaagaacgcgttaagaaaattatcggcgaacagctgggcgttaagcaggaagaagttaccaacaatgcttctttcgttgaagacctgggcgcggattctcttgacaccgttgagctggtaatggctctggaagaagagtttgatactgagattccggacgaagaagctgagaaaatcaccaccgttcaggctgccattgattacatcaacggccaccaggcgtaagtgaacatctccaggcggtcgttcgaccgcctgagttttatctttttgtcccactagaatcattttttccctccctggaggacaaacgtgtctaagcgtcgtgtagttgtgaccggactgggcatgttgtctcctgtcggcaataccgtagagtctacctggaaagctctgcttgccggtcagagtggcatcagcctaatcgaccatttcgatactagcgcctatgcaacgaaatttgctggcttagtaaaggattttaactgtgaggacattatcagccgcaaagaacagcgcaagatggatgccttcattcaatatggaattgtcgctggcgttcaggccatgcaggattctggccttgaaataacggaagagaacgcaacccgcattggtgccgcaattggctccgggattggcggcctcggactgatcgaagaaaaccacacatctctgatgaacggtggtccacgtaagatcagtccattcttcgttccgagtacgattgtgaacatggtggcaggtcatctgactatcatgtatggcctgcgtggcccgagcatctctatcgcgactgcctgtacttccggcgtgcacaacattggccatgctgcgcgtattatcgcgtatggcgatgctgacgtgatggttgcaggtggcgcagagaaagccagtacgccgctgggcgttggtggttttggcgcggcacgtgcattatctacccgcaatgataacccgcaagcggcgagccgcccgtgggataaagagcgtgatggtttcgtactgggcgatggtgccggtatgctggtacttgaagagtacgaacacgcgaaaaaacgcggtgcgaaaatttacgctgaactcgtcggctttggtatgagcagcgatgcttatcatatgacgagtccgccagaaaatggcgcaggcgcagctctggcgatggcaaatgctctgcgtgatgcaggcattgaagcgagtcagattggctacgttaacgcgcacggtacttctacgccggctggcgataaagctgaagcgcaggcggtgaaaaccatcttcggtgaagctgcaagccgtgtgttggtaagctccacgaaatctatgaccggtcacctgttaggtgcggcgggtgcagtagaatctatctactccatcctggcgctgcgcgatcaggctgttccgccaaccatcaacctggataacccggatgaaggttgcgatctggatttcgtaccgcacgaagcgcgtcaggttagcggaatggaatacactctgtgtaactccttcggcttcggtggcactaatggttctttgatctttaaaaagatctaagttgtcattttccacccttataaaaggtccgcttgcgggccttttttcttagcttttattccgacttgttccgtagtgaacatgctgccacactaacaattctctgataaggagccggtatgttcttaattaacggtcataagcaggaaagcctggcagtaagcgatcgggcaacgcagtttggtgatggttgttttaccaccgccagagttatcgacggtaaagtcagtttgttaagcgcgcatatccagcgactacaggatgcttgtcagcggttgatgatttcctgtgacttctggcctcagcttgaacaagagatgaaaacgctggcagcagaacagcaaaatggtgtgctgaaagtcgtgatcagtcgcggtagtggcgggcgagggtacagcacattgaacagcggaccggcaacgcggattctctccgttacggcttatcctgcacattacgaccgtttgcgtaacgaggggattacgttggcgctaagcccggtgcggctggggcgcaatcctcatcttgcaggtattaaacatctcaatcgtcttgagcaagtattgattcgctctcatcttgagcagacaaacgctgatgaggcgctggtccttgacagcgaagggtgggttacggaatgctgtgcggctaatttgttctggcggaagggcaacgtagtttatacgccgcgactggatcaggcaggtgttaacggcattatgcgacaattctgtatccgtttgctggcacaatcctcttatcagcttgtcgaagtgcaagcctctctggaagagagcttgcaggcagatgagatggttatttgtaatgcgttaatgccagtgatgcccgtatgtgcctgtggcgatgtctcctttagcagtgcaacgttatatgaatatttagccccactttgtgagcgcccgaattaatcatgaaaaaagtgttattgataatcttgttattgctggtggtactgggtatcgccgctggtgtgggcgtctggaaggttcgccatcttgccgacagcaaattgcttatcaaagaagagacgatatttaccctgaagccagggaccggacgtctggcgctcggtgaacagctttatgccgataagatcatcaatcgtccacgggtttttcaatggctgctgcgtatcgaaccggatctttctcactttaaagccgggacttaccgctttacaccgcagatgaccgtgcgcgagatgctgaaattgctggaaagcggtaaagaagcacagttccctctgcgactggtagaagggatgcgtctgagcgattacctcaagcaattgcgtgaggccccgtatatcaagcatacgctgagcgatgataagtacgccaccgtagcgcaggcacttgaactggaaaacccggagtggattgaaggttggttctggccagacacctggatgtataccgccaataccaccgatgtcgcgttactcaagcgagcgcacaagaaaatggtgaaagcggtcgatagcgcctgggaagggcgtgcggacggtctgccttataaagataaaaaccagttggtgacgatggcaagtattatcgaaaaagaaaccgccgttgccagtgaacgcgataaggttgccagtgtatttatcaaccgtttacgcattggtatgcgcctgcagaccgacccgaccgtgatttacgggatgggagagcgttataatggcaaactttctcgtgcagacctggaaacgccgacagcgtataacacctataccattaccggtctgccgccaggtgcgatagcgacgccgggggcggatagcctgaaggctgctgcgcatccggcaaaaacgccgtatctctattttgtggccgatggtaaaggtggtcacacgtttaataccaatcttgccagtcataacaagtctgtgcaggattatctgaaagtgcttaaggaaaaaaatgcgcagtaagtatatcgtcattgaggggctggaaggcgcaggcaaaactaccgcgcgtaatgtggtggttgagacgctcgagcaactgggtatccgcgacatggttttcactcgggaacctggcggtacgcaacttgccgaaaagttaagaagcctggtgctggatatcaaaagcgtaggcgatgaagtcattaccgataaagccgaagttctgatgttttatgccgcgcgcgttcaactggtagaaacggtcatcaaaccagctctggctaacggcacctgggtgattggcgatcgccacgatctctccactcaggcgtatcagggcggcggacgtggtattgaccaacatatgctggcaacactgcgtgatgctgttctcggggattttcgccccgacttaacgctctatctcgatgttaccccggaagttggcttaaaacgcgcgcgtgcgcgcggcgagctggatcgtattgagcaagaatctttcgatttctttaatcgcacccgcgcccgctatctggaactggcagcacaagataaaagcattcataccattgatgccacccagccgctggaggccgtgatggatgcaatccgcactaccgtgacccactgggtgaaggagttggacgcatgagatggtatccatggttacgacctgatttcgaaaaactggtagccagctatcaggccggaagaggtcaccatgcgctactcattcaggcgttaccgggcatgggcgatgatgctttaatctacgccctgagccgttatttactctgccaacaaccgcagggccacaaaagttgcggtcactgtcgtggatgtcagttgatgcaggctggcacgcatcccgattactacaccctggctcccgaaaaaggaaaaaatacgctgggcgttgatgcggtacgtgaggtcaccgaaaagctgaatgagcacgcacgcttaggtggtgcgaaagtcgtttgggtaaccgatgctgccttactaaccgacgccgcggctaacgcattgctgaaaacgcttgaagagccaccagcagaaacttggtttttcctggctacccgcgagcctgaacgtttactggcaacattacgtagtcgttgtcggttacattaccttgcgccgccgccggaacagtacgccgtgacctggcttagtcgcgaagtgacaatgagtcaggatgcattacttgccgcattgcgcttaagcgccggtagccctggcgcggcactggcgttgtttcagggagataactggcaggctcgtgaaacattgtgtcaggcgttggcatatagcgtgccaagcggcgactggtatagcctgctagcggcccttaatcatgaacaagctccggcgcgtttacactggctggcaacgttgctgatggatgcgctaaaacgccatcatggtgctgcgcaggtgaccaatgttgatgtgccgggcctggtcgccgaactggcaaaccatctttctcccagccgcctgcaggctatactgggggatgtttgccacattcgtgaacagttaatgtctgttacaggcatcaaccgcgagcttctcatcaccgatcttttactgcgtattgagcattacctgcaaccgggcgttgtgctaccggttcctcatctttaagagagacatcatgtttttagtcgacagtcactgccatctcgatggtctggattatgaatctttgcataaggacgtggatgacgttctggcgaaagccgccgcacgcgatgtgaaattttgtctggcagtcgccacaacattaccgggttatttacatatgcgggatctggtaggcgaacgtgacaacgtcgtattttcttgtggcgtgcatccactcaaccagaatgatccctacgatgtagaagatttacgccgtctggcggcagaagagggtgttgtagcgctgggtgaaaccgggctggattattattacacgccggaaactaaagtacgtcagcaagagtccttcatccatcatatccagattggtcgtgaactgaacaagccggttatcgtccatacccgtgacgcccgtgccgatacgctggcaattctgcgcgaagaaaaagtgacggattgcggtggcgtactacactgttttacagaggacagagaaacggcgggtaaattactggatctcggattttacatctccttttccggcattgtgaccttccgtaatgcggagcaactgcgcgatgctgcgcgttatgtccccctggatcggttactggtggaaactgacagtccttaccttgcgccggtaccgcatcgaggaaaagagaatcaacctgcgatggttcgtgacgttgcagaatacatggctgtgttgaaaggtgttgccgttgaagaactggcgcaggtaaccaccgataacttcgcccgtctgtttcacatcgacgcttcccgccttcaatccatccgttgaatgagtttttttaaagctcgtaattaatggctaaaacgagtaaagttcaccgccgaaaattgggcggtgaataaccacgtttgaaatattgtgacatatgttttgtcaaaatgtgcaacttctccaatgatctgaagttgaaacgtgatagccgtcaaacaaattggcactgaattattttactctgtgtaataaataaagggcgcttagatgccctgtacacggcgaggctctccccccttgccacgcgtgagaacgtaaaaaaagcacccatactcaggagcactctcaattatgtttaagaatgcatttgctaacctgcaaaaggtcggtaaaagcctgatgctgccggtatccgtactgcctatcgcaggtattctgctgggcgtcggttccgcgaatttcagctggctgcccgccgttgtaagccatgttatggcagaagcaggcggttccgtctttgcaaacatgccactgatttttgcgatcggtgtcgccctcggctttaccaataacgatggcgtatccgcgctggccgcagttgttgcctatggcatcatggttaaaaccatggccgtggttgcgccactggtactgcatttacctgctgaagaaatcgcctctaaacacctggcggatactggcgtactcggagggattatctccggtgcgatcgcagcgtacatgtttaaccgtttctaccgtattaagctgcctgagtatcttggcttctttgccggtaaacgctttgtgccgatcatttctggcctggctgccatctttactggcgttgtgctgtccttcatttggccgccgattggttctgcaatccagaccttctctcagtgggctgcttaccagaacccggtagttgcgtttggcatttacggtttcatcgaacgttgcctggtaccgtttggtctgcaccacatctggaacgtacctttccagatgcagattggtgaatacaccaacgcagcaggtcaggttttccacggcgacattccgcgttatatggcgggtgacccgactgcgggtaaactgtctggtggcttcctgttcaaaatgtacggtctgccagctgccgcaattgctatctggcactctgctaaaccagaaaaccgcgcgaaagtgggcggtattatgatctccgcggcgctgaccagcttcctgaccggtatcaccgagccgatcgagttctccttcatgttcgttgcgccgatcctgtacatcatccacgcgattctggcaggcctggcattcccaatctgtattcttctggggatgcgtgacggtacgagcttcagccacggtctgatcgacttcatcgttctgtctggtaacagcagcaaactgtggctgttcccgatcgtcggtatcggttatgcgattgtttactacaccatcttccgcgtgctgattaaagcactggatctgaaaacgccgggtcgtgaagacgcgactgaagatgcaaaagcgacaggtaccagcgaaatggcaccggctctggttgctgcatttggtggtaaagaaaacattactaacctcgacgcatgtattacccgtctgcgcgtcagcgttgctgatgtgtctaaagtggatcaggccggcctgaagaaactgggcgcagcgggcgtagtggttgctggttctggtgttcaggcgattttcggtactaaatccgataacctgaaaaccgagatggatgagtacatccgtaaccactaatccgtaagacgttggggagactaaggcagccagatggctgccttttttacaggtgttattcagaattgatacgtgccggtaatgctgaaattacgcggtgtgccgtagacgatagaaccttccacgttggtatcgtaggttttgtcgaacaggttattgacgttcccctgtaagctgaagtttttcgtcacctggtagcgggtgaagagatccaccagcgcgtagctaccttgctcggcgcggaaggtgccatacggcgtcacggtgtcggtatacacgcgattttgccagttaacaccaccgccgaccgtcaactctggcatgacaggcaaccgatagctggtgaacattttaaccgtggtgcgtggcagattaggattaacggcgtttccttcgttatcctctgcaatatagcgcgttgcgccaaatgtcagctgccagttgtcggtaattgcgccgttgagttcaaattccacccctttactgactgtcccatccaccgctttataggcggtttcgccgttgctgccggggataggtgtaccggtggactgagcgacattatcctgctcaatacggaagatggctaacgtggtggtcagacggctattcatccagtcgcttttcagacccagctcgtagttgttaccggtgattggagccagatatttgccactactgtcacgatcattttgcggctggaaaatagaggtatagctggcgtaggtgctccagttgtcattgatgtcaaacaccagaccagcgtaaggcgtggtgtggtttttctccatgctgtaagtcagcgtatcaacccgccagttggtataacgtgcgccgaggatcagatgcagcggatcggcaagggtgacacgagtggcagcatataagcttttcatatgtgtggtatcgtcctgcgccaggctctgtggactccagtcggtttgtgggaaattgccattaaagttgtagaaactgccaatttcatccgggaagatgttggcccaactactgaagtaacgattgttttgtttgctgtaactgccaccaaacattagattgtgctgacgaccaaacaattcataactaccgtcagcgaacaaatccagcgcatcaactttacgtttgccactgttccaaccggtgccgccgacataatcaaagccaggtccataattactgtatggcccaaccagcataccatccgctttgtttacataggcatcgacatacatcattttgctgtcaaattcgacttcagagtgggtggcattcagtgtcgcttgccaggtatcagcaaactgctgcttcagggtcataaagaccttgttgatctctttatcgttgtacgcccagtcaggtgcggtactgcgtgcgcgatcgtaactgttgctgctgccatcagtattccagcgcggtaaaccgccccaggtagggctattaacatcaatgcgctgatattcgtaaccggcactaagcgtcgtaagatcgcctaaatcagcatcgacaatgccgctgaagaaggtcttttcactgttgtagcggtccagccaactgtcgttattctggtagccgccgacaattcgcgcgcggattttaccgtcttcggtgagtgggctttgtaaatccgccacataccgttctttgttccagctaccgtattccgcgctgacatcgcctttaaattcacgactggtcgcgtgttttcgaaccatattaattgccgcagatggattacccgtcccggtcatgagtcctgtcgcgccacgcactacttctacgcgttcaaagagtgccatatcagaaagtgcgtcgcccagattccagcggctttcaaaataggtggggataccatcaaccatatagttatcgatctggaatccgcgggaataataaagagcacgatcggaatccgcctgacttttgctgatccccagcgtgttttccatcacttcgcccagcgtttgtaactgctgatcttccatccgctgctggctaacaatagtgacgctctgaggaatatcacgttgagtcatctgcattttggtacccgcagaggtagacgttacgctgtaatcattttcgccatcatctggagctgtggcactaccctcaacaatcaccgtttcttcagtggctggtgcagcaaaagcggcagaaggtaatagtgccagtgctatgcaaccggcaagtagactcggtttggtgatggcttgatattgattatccctgttaaattgtgtactaagcatttgaaatctcttggtttatgttgtcgtcaggctcatgccggaggagggtgatgagcgattatatttagtgtgcgaataattttgtttgtaaatgcaaatgagaaatatacgcattcatatttgtcatgtaaaccaaacagagaatgtcttttcagcgcattcgcaggcagaaatgggaataatggcgatatatacggcagcaaaacgattttttgcttaagaaatcgtgagttaaggttgaaagagcaggtttaactcgaccatactctatactcgcagtgtggcgcggcgtagcatggcgcaacgcatggctatttgaaaaaggaaaatgtcgtggcagaagaaactatattcagcaaaattattcgtcgtgagatcccctccgatatcgtctaccaggatgatctggtaacggcgtttcgcgatattagcccgcaagcgccaacgcatattctgatcattccgaatatcctcattccgactgtgaacgacgtcagtgctgagcatgagcaggcgctgggacgcatgatcaccgtagcggcaaaaattgctgagcaagaaggtattgccgaagatggctatcgtctgatcatgaataccaaccgccatggcggacaagaggtttaccacatccatatgcacttgttgggtggccgtccgctgggaccaatgctggcgcataaaggtctgtaacgatgagaaaaggatgctttgggctggtgtctctggtgttgttactgctggtgggctgtcgtagtcatccggaaattccggtgaatgatgagcaaagcctggtgatggagagttctttattggctgcgggcatcagtgcagaaaagcccttccttagcacgtctgatattcaacctagtgcatccagtacgctttataacgaaaggcaagaacccgttaccgttcattatcgtttttactggtatgacgccagagggctggagatgcatcctctggaaaggccacgcagcgttaccattcccgcacatagcgcggtaacgctgtacggcagcgccaattttctgggggcgcacaaagtcagactttatctatatttgtaaggggtgaatcttgatgacaaaaatgagtcgctacgccttgattaccgcgctggcgatgtttctcgccgggtgtgtggggcaacgtgaacctgcaccggtagaagaagtgaaaccagcgccggaacaaccagccgagccacaacagcctgtccccacagtgcccagcgtgccgacgatcccgcagcagccaggcccaattgagcacgaagatcaaactgcaccgcctgcgccgcatattcgccattatgactggaatggcacaatgcagccgatggtcagtaagatgcttggggctgacggggtgactgcgggtagcgtcctgctggttgatagcgttaacaaccgtactaacggtagcctgaatgccgcagaagcgaccgaaacgctgcgaaatgcgctggctaataacgggaaatttaccctggtttccgcccagcaactgagcatggcgaagcaacagttaggtttgagcccgcaggacagtttaggcacccgtagtaaagccataggcattgcccgcaatgtcggcgctcattacgtgctgtactccagcgcctctggcaacgttaacgctccgaccctacaaatgcagctgatgctggtgcagacgggcgaaattatctggagtggtaaaggtgccgttagccagcaataagtaaaattatctggtcaggtaaaggtgccgtttcgcagcaataatcccatcacgcgcgacgaattgctgagccgctttttcccgcagtatcatcccgtcacgacgtttaatagtgggcttagtggcgggagttttctcattgaacatcagggccagcgttttgttgtgcgtcagccgcacgatcctgatgcgccgcagtccgcgttcttgcgccagtatcgggctttaagtcaactacccgcatgcattgcaccgaagccgcatttatatctccgtgactggatggtagtcgactatctgcccggcgcggtaaaaacgtatttgccggataccaacgaactggcaggcttgctgtattatctacatcaacaaccacgttttggctggcgaataacgctgttgccgttactggaactgtactggcagcaaagcgatccggcgcggcggacagtgggttggctgcgaatgttaaaacgtctgcgcaaagcgcgggaaccacggcctttacgcttaagtccattgcatatggatgtccacgccggaaatttagtgcatagcgcgagtgggttaaaactcatcgactgggagtatgccggagatggtgatatcgcgctggaactggcggcggtgtgggtggaaaatactgaacagcaccggcaattggtcaatgactatgccactcgcgcgaagatttatccggcgcaattatggcgtcaggtcaggcgatggtttccctggctgctgatgctcaaagcagggtggtttgagtaccgctggcgacaaaccggcgatcaacaatttatcaggctggccgatgacacctggcggcagctattaataaaacaataaggagagcagtgtgggtccagtaatgttggatgtcgaaggttacgaactggacgcggaagagcgtgaaatactggcgcatccgctggtgggagggctgattctctttacgcgtaactatcatgatcctgcccagttacgtgaactggtgcgccagatccgcgcagctagccgcaatcgtctggtggtggcggttgatcaggaaggtggacgcgtgcagcgttttcgtgaaggttttacccgcttgccagcggcgcaaagtttcgctgcgctgagtggaatggaagagggtggcaaactggcgcaggaggcaggttggttgatggccagcgaaatgatcgctatggatattgatatcagctttgcgcctgtgctggatgtcgggcatatcagcgcggcgattggcgagcgttcttatcatgccgatccacaaaaagccctggcaattgccagccggtttattgatggtatgcatgaagccggaatgaaaacgaccgggaaacacttcccaggacacggtgcagtaacggcagacagtcacaaagaaacaccgtgcgatccacgtccacaagcggagattcgcgctaaagatatgagcgtcttcagttccttaatccgcgaaaataaactcgacgccattatgcctgcgcatgtgatctacagtgatgttgatccgcgtccggcgagcggttctccctactggctgaaaaccgttttgcgtcaggaactgggttttgacggcgtgattttctctgacgatttaagcatggaaggtgccgcgattatgggcagttatgccgaacgcgggcaggctagtctggatgcgggttgcgatatgatcctggtctgcaataatcgtaaaggggccgtcagcgtgttagataatctgagtccgatcaaggcagaacgtgttacacgtttgtatcataaaggtagttttagccgacaggaactgatggacagcgctcgctggaaagcgatcagcacccgtctgaatcagttacatgaacgctggcaggaagagaaagcaggtcactaaccctggcttatgtgaggaagcgatgattatctatttacacggttttgactctaacagtccgggtaaccacgagaaagtcttacaattgcagtttattgacccggatgtacgcttgataagctacagtacgcggcatccgaaacatgatatgcagcatctgcttaaagaagtggacaaaatgttgcaactgaacgttgacgagcgtccgctaatttgcggcgttggcttgggcggatactgggcggaacggattggttttctttgcgacatccgccaggtgatcttcaaccctaatttgttcccttatgagaacatggaaggcaagattgatcgcccggaagagtatgccgatattgccactaagtgtgtgaccaacttccgtgagaagaatcgcgatcgttgcctggtgattttgagccgtaatgatgaagcgcttaacagccagcggacatctgaagagttgcatcattattacgagattgtctgggacgaagagcagacgcacaaattcaagaatatctccccgcatttacagcgcattaaagcgttcaaaaccctcgggtaaatgccctcgtcgcatcaggtaaccttgccggtacctgatgcgctccgaattctgtgggtcggataaggcgtccacgccgcatccgacagtcgagcatcaatgcctgatgcgcttcttatcaggcctaccgaacgccctgcatacacccctcactctatatcactctcacaaattcgctcaaataataaacaataaactctgttttttgatctcacccggtaaagtcgcctatcttttcagcaacaaaacttgattaacatcaattttggtatgaccaatgcaccattcatgttattctcaatagcgaagaacattttcattgctgtaacctgttgttaattaagagctatgttaataaccattaattaacaattggttaataaatttaagggggtcacgttgactacgccattgaaaaagattgtgattgtcggcggcggtgctggtgggctggaaatggcaacacagctggggcataagctgggacgcaagaaaaaagccaaaattacgctggtcgatcgtaaccacagccacctgtggaaaccgctgctgcacgaagtggcgactggcagccttgatgaaggcgtcgatgcgttgagctatctggcccatgcgcgcaatcatggtttccagttccagctgggttccgtcattgatattgatcgtgaagcgaaaacaatcactattgcagaactgcgcgacgagaaaggtgaactgctggttccggaacgtaaaatcgcctatgacaccctggtaatggcgctgggtagcacctctaacgatttcaatacgccaggtgtcaaagagaactgcattttcctcgataacccgcaccaggcgcgtcgcttccaccaggagatgctgaatttgttcctgaaatactccgccaacctgggcgcgaatggcaaagtgaacattgcgattgtcggcggcggcgcgacgggtgtagaactctccgctgaattgcacaacgcggtcaagcaactgcacagctacggttacaaaggcctgaccaacgaagccctgaacgtaacgctggtagaagcgggagaacgtattttgcctgcgttaccgccacgtatctctgctgcggcccacaacgagctaacgaaacttggcgttcgcgtgctgacgcaaaccatggtcaccagtgctgatgaaggcggcctgcacactaaagatggcgaatatattgaggctgatctgatggtatgggcagccgggatcaaagcgccagacttcctgaaagatatcggtggtcttgaaactaaccgtatcaaccagctggtggtggaaccgacgctgcaaaccacccgcgatccagacatttacgctattggcgactgcgcgagttgcccgcgtccggaagggggctttgttccgccgcgtgctcaggctgcacaccagatggcgacttgcgcaatgaacaacattctggcgcagatgaacggtaagccgctgaaaaattatcagtataaagatcatggtagcctggtaagcctgagcaacttctccaccgtcggtagcctgatgggtaacctgacgcgcggcagtatgatgattgaaggacgaattgcgcgctttgtatatatcagcctataccgaatgcatcagattgcgctgcatggttactttaaaaccggattaatgatgctggtggggagtattaaccgcgttatccgtccgcgtttgaagttgcattaatcgacgtacactggcggatgtggcataaacgcctcatccgcccttgaggaacagcgcgatcggcagccgcgttgtatcaggcatcctttcagactcctccgaatccttaagtatttccagccattcccgcgcttttcatcttctgtctgatagctgcttttctccttcgcttgcatgattggcataactgcaaagaaggaggtgttcccgtaaataaaagtatgttggcgggtatcgggattggtgtcgcagctgcgctgggcgtagcggcagtggccagtctgaacgtgtttgaacggggcccgcaatacgctcaggttgtttctgcaaccccaatcaaggaaacggttaaaacaccgcgtcaggagtgtcgcaacgtcacagtgacccatcgtcgaccggtgcaggatgaaaatcgcattaccgggagcgtgctcggcgctgttgctggcggcgtgatagggcatcagtttggtggtggtcgcggtaaagatgtcgccactgttgtgggggcgctgggtggtggatatgccggtaaccagatccagggctctctccaggaaagcgatacttacacgactacgcaacagcgttgtaaaacggtgtatgacaagagtgaaaaaatgctcggttatgatgtgacctataagattggcgatcagcagggcaaaatccgcatggaccgcgatccgggtacgcagatcccgctagatagcaacgggcaactgattttgaataacaaagtataacaaggctgtactctgcaatttggcccctcattcgctcaggctgaggggctttttttgcgacttatttcaccagttcgggccataaacgcaaagtcgttccggcaatctgcatcagtttttccaggcttgcaccttcgcgtgcgctgatgctcatcccctgaataatacaattaaggaattctgccagatgtgtcacgtcacagtggggcgggatttccccgcgcgcttgtcgttgacataaaaactgctgcaaagtgcgctcttgcatcgcatggcgacttttcaacgtattggcgatatctccactatctggggagagggtggtgcagttgttgatcatgaagcagcctgccggggtgtctttgctggtaaagcagttggcgatggcagcaaaatagtcagccagcgcagactccacgcttttctcttcacaaaacagctgtgcttcatgcttagcggcaaaacgatcgatatagcggtcgagaacggcacgaaataacccctctttgttggtaaattccgcgtatagcgtgggcgctttggctccggtcgcttcgacgaggtccgcaagagaagtcgcttcataaccgtgttgccagaacaatttcatggccttatcaagcgcggcatccctgtcgaacacttttgggcggccacggcttttttttacacattgtgtactgtcagttgccatgatgccgttgtacctggtgactgtgaatgaaaggttattataaaaataatcacctccgttcaccagtccagatcccataaaaataattgctttctatttaactgaaatttaaagatttttaaattaattaatgattgttataaaaaatatcttgtatgtgatccagatcacatctatcatttagttatcgatcgttaagtaattgcttgcgacgtcattcatctgcataaggccactattatgaaaaacgtaaaaaccctcatcgctgcggcgattttaagctccatgagttttgccagctttgcggctgtcgaagttcagagtacgccagaaggccaacaaaaagtcggtacaatcagtgctaacgcggggacaaatctgggaagcctggaagagcagctggcgcaaaaagcggatgagatgggcgcaaaatctttccgtattacttctgtaaccggtccgaataccctccatggaacagcagtaatttataaataagcattaaccctcattaatgcctgctactgctgattttttccccgcgacatgccgtgtcgcggggatttttttatccgggctttacagcgtttgtgggctcacttgatgacggcggacatccaccggcatcccggaacggacatccatcacatgttgcatcacttcagcgtcagtttgtgctgcatctttaaaactttgcattgcgctattcagcgtaattggcagcagctgcggatcgtcatcaatcttctcactcagcggctgatgtacttcaaccagacgcgcaccgtttggttcggcagagacttttatcggagtgttgatgatattcactttggtgcctggggtgacctggctaaagagtgttttgatatcgtcatcccgcagacgaatacagccagaacttacccgcatgccaatgccgaaatcggcgttcgtaccatgaagcaaataaacgccgccataggccgccagacgaatcgcatgatggcccattgggttatccagtccagccggcactaccgcaggcaactcaattccctgtgctttataacgggcgcggatgtttgccgttggcgtccaggttgggtttgcacgtttgtcactaacggtggtcaccattgtcggtgtcagcgtgtcaccacctaactgaccaatacctattggatacacggttacgctatttttacccggcgggtagtaatagagacgcagctccgcaatgttgatcacaatgccttcgcgcggcgcatctggaagtagggtttgcaacgggatcgttaacacgctgcccgcgcgcggtacgtaaggatcaacgccggggttagcctgtaacagagcgagaaagccgacgttgtattttttggcgatggcttccagagaaccaccgtcattttccaccacatgaaatttgttttcgccaaccagacgactgcccgctggcggcagcggccaggtgttggcttttgccggtagcgccagcgccacggcagcggcgaacgtaaaaaacgttagccagcgagaaaaacgcgttttgatcatcaccaaaaatccataataaatataaggttattgtaataaacagataagcctgaattatggatggtgacagtgtcggatagtgcagggaagtgcaaagaatttgtaaatgttgcagatgggggcgcagaaacgcccccgatttaccattaagcgatcgcgttctcttccagttcacgcataaactggcgtacccattcgatacgcgttttccgctcactcaaatcctgaataaatttcaggcgcgtcggaccatcaaggcggtaatgctgcggctgtttttgcagcaaaccaatcaaccaggccggattaacgtgattcttctcggcaaattcgatcaccccgcctttctcattaccttccagcttcctgatccccagtttctgcgcttgctggcgcagacgggcaatatccagcagggtacgcgccggatctggcagcaggccgaagcgatcgataagctcgactttgatctcttccagttcgttttccgttttggcgctggcaatacgtttgtagaagctcagacgcgtgttcacgtcagggatgaaatcatctggcaataggctcggcatccgcagctcgacttctgtttgctggctggtgagatcttccaggctcggctcgcgtccggctttcagtgcatcgacggcgttttccagcaactccatatacaggctgaaaccgatggtttccatactgccgctttgttcttcgccaagcagttcacccgcgccgcgaatctccagatcgtgcgttgccagcgcaaaacctgccccgagatcttccaggctggcaattgcttcaagacgtttttgtgcatcggtagtcatcgcttttggatgcggtgtcagcaaccatgcatatgcctgatgatggctacgtccgacgcgaccgcgtaactggtgcagctgcgccagaccgaagtgatccgcgcgttcaatgataatagtgttggctgtcgggatgtcgatcccggtttcgataatggttgtacaaaccagcacgttgaaacgttgatgatggaaatcattcatcacccgttccagttcgcgctcgcgcatctgcccgtgaccgatggcgatccgcgcttctggcaccagttctgccagccgttcggcggctttctgaatgttttccacatcattgtagagataataaacctgtcctccgcgcaaaatttcacgcaggatcgcctcccggaccaccatgctgtcatactcacggacaaaggttttaactgccagacgacgggcgggcggcgtggcgataatgctcaggtcacgcattccgctcattgccatattcagcgtacgtgggatcggcgttgcagtaagcgtcagaatatccacgttcgcgcgcatcgctttaatgcgctctttatgacgcaccccgaagcggtgttcttcatcgacaatcagcaggcctaaatctttaaacttgacgtcactttgcagcagtttgtgcgtaccgatcagaatatcgattttcccttccgccacttccgcaaggatttgcgtctgctctttggcgctgcggaaacgggagatcatttcgatacgtaccggccagttggcgaaacggtcgcggaagttgtcgtaatgctgctgcgcgagaagggtggtaggcaccagcaccgccacctgcttgtggttatctactgccaggaaagctgcgcgcatcgccacttctgttttaccaaagccaacatcgccgcacaccagacgatccattgccagcggctgacacatgtcgctaagtaccgcattaatggcctgcgcctgatccggcgtggtttcaaacgggaagctgtcgcagaacaactgatactgctcacgatcgtgtttaaacgcgaagccctctttggcggcgcgttgcgcgtagatatccagcaattccgccgccacatcacgcactttttccgccgctttctgccgcgcgcgactccacgcatcgccgccaagtttatgcagcggggcgttttcttccgcgccacctgcgtaacggctaatcagatgcagactgctcaccggaacatacagtttggcgtcgttggcataggtgagcatcagatactcgccagtaatgccacccgcttccagcgtggtcattccggcataacgaccgacgccgtgctccagatggaccaccggctgaccaatatgcagttccgcaaggttacggatcagtgtatcggggttgatggtgcggcgagaatcctgacgacgacgggcaacgcgttcaccgagcagatcgctttcgcaaatcagcgccagattacgcaccgtatcgacaaaaccatgttcggcagcgccaatcatcagataacgcccacggtcgctggcttcatcaagacgcataatgcgttgcggagcaattttaattcgtgcgagcagttcacccagcgcttcacggcgaccttcactttctacgctgaacaccaccggaccgtcgaaagtctcgaggaacttacgcagcgcatccagcggcgctttttgttgtgcctgaacggccaggtctggcagtttctggaaacctaaattggcattcgcggcttttgtcggtaaatgttcagtttttagctgcacccggggccagtttttcagctcactgaagagctcgtccacccgcagccagaggctttgtggtggcaacagcgggcgcatcggatcgacgccgcgattctcaaaacgcgccagcgtgtcagcctggaaacgttcggcactggtttccagatcgccagtattcacgagcaaggtattggcagggaaataactgaacagcggcggcagtggttcgctgaagaacaatggctgccagtactcgatcccggcaggtaatgtgcctttactcacttgctggtaaatatgttctggatcgcgcttcacttcgaaggtatcgcgccactggctgcggaacagttcaattgccgctttatcggtcggaaattcgtgcgcgggcagcagattgatcgcttctacttcctccagcgtgcgctggctgtcgacgtcaaacacccgcaggctgtcgatttcatcatcaaagaaatcaagacgataaggcagctcactccccatcgggaagagatccagcaacgcgccgcgcgtggcgtattcgccgtgctccatcacctggtcaacatggcgataaccggcgctgtccagttgggttcgtaatgcatctcgactcaggcgctgaccttttttcatcaccagcgcatgaccgtggagaaaactgtgtgggcaaacgcgctgcataagcgtattcaccggaacaatcagtacgccacgctgcatcgtcggtagctggtaaagggtggaaaggcggctggagataatgtcctgatgagggctaaaactgtcgtagggaagagtttcccagtccgccagattcatcaccatttgatcggtaaactggctgatttcatcatgcaaacgcagagcattttgcatatctggtgcaatgagtaccaccggaccggcgtgacgttcggcaatttccgctaccagcgttgcacaggctgcgccggttaactcgcccagcagacgctgctcacccgctttgacgggcagcgtataacgatattgttcaggcataacggttgtcagattctcgttaggatatgcctcaacatatgggggcatatctctgataagcaatgctgttcattatccgtaatcgacatggtttagcaaattgaatcgccccggctggggcgatggcttagcgggagtaactgacggcagcgggcagactaggcggggagaacaacagatcgctgaatgcacgctgactaagttttcttaccagcaagcccgcaacagtacagatgaacaaactgacaaagggataaaccagcaggagtgtcagttcgacttgcgggctccagcgtgctgcgttcatttgcgcaagcagagttaagctgaatatttcaaccagaatgcgatgggtggtgtagatagcaatggtgttggagccaatcacattcagcaggctggtggagcgcataccgaatcgttgctcgtattgataaaacagcttcatgatcaccacaatgcttaccaggctcaacagcaggctgatagtaaacaaccaggcaccgaccgccagaacggtaagcaaagaagccatcagcagatggcggcgcaacggcacctctttaacacaggtcattattgttgcgccaaaccatgcgccaaggctgtaataaggcaaattgcggatcacactgttcattccccaccacggcgtgggaacgaaattaaccgccacactcagcagtacaaacaaggcgaatagtggcagcgccagacggctaaaaattttacataccacgaaatagacaattaacgcatacagataccacaagctggtgctggcggtgatcatcccgtgcaggaactcaccggtggaatcggcataagcggcattggaggcattgcttaaatcgcgctcaggtgccagccactggttcagcgcacttaacgccagccactgcaccacgccccaaagcgccagcacccagaagatgttccagatccgtttatcgagacaatttccccacggtacgctgtcgatatagcggcgaatcaaatagccggatataaagaaaaaaaccggcatacgaaagggggcaaggtaaagattgaaatagatccagcatttgctcaggacttcgcttaacggatgctgaaaagtggtcagatgcggataaaaggtaatgacgctgtgataaatcaccaccagacaaatacataaccctttgatctggttaatccatagctctttttgtttcatcaggacaacacgctcttttttaatttacatgcggttgatcctgcgggttatgacccgaggtgtaatgggtatctgtctgtattggatgatttttcagattaagatcaggcggcaagattgatgataaaacatggcaatttagccgattgatttacgggggcttttcagattagccctgacgatcacttacagttcagacgtttacccatcttgctttcgcttatatactcgtgtctttgctacagcaaccagacggatttcatgtaccaacctgtcgctctatttattggcctgcgttacatgcgtgggcgtgcagcggatcgcttcggtcgtttcgtctcctggctttctaccatcggcattaccctcggggtgatggcgctggtcacagtattgagtgtgatgaacggctttgagcgcgagctgcaaaacaacatccttggcctgatgccacaggcaattctctcttctgagcatggctctcttaacccgcagcaactcccagaaacggcagtcaaactggacggcgttaatcgcgtcgcacctattactaccggtgatgtggtactgcaaagcgcgcgcagcgtggcggtcggggtgatgctcggtatcgacccggcgcaaaaagatccacttacaccgtatctggtcaatgtgaaacaaactgacctcgagccggggaaatataatgtcatcctcggcgaacaacttgccagtcagctaggcgttaatcgcggtgatcaaatccgcgtgatggtaccatctgccagccagttcacgccgatggggcgtattccaagccagcgcctgttcaatgtgattggcactttcgccgccaacagtgaagtcgatggctatgaaatgctggtgaatattgaggatgccagccgtctgatgcgttatccggcaggcaatattaccggctggcgtttgtggctggatgagccgctgaaagtcgacagtttaagtcagcaaaaactgcctgaaggcagcaaatggcaggactggcgtgatcgtaaaggcgagttgttccaggccgtacgcatggaaaaaaatatgatgggtttactgctgagcctgattgtcgccgttgcggcgtttaacattattaccagtctagggctgatggtaatggagaagcagggcgaagtagcgatcctgcaaacgcaaggcttaactccgcgacaaatcatgatggtctttatggtgcaaggggccagcgccgggattatcggtgcgatcctcggagcggcgcttggcgccctgcttgccagccagttaaataatctgatgccgataatcggcgtcctgcttgatggcgcggcgctgccggtggctatcgaacctttacaggtcattgttattgcgctggtggcgatggctatcgcgctgctgtctacgctttaccctagttggcgcgctgccgccactcaacccgctgaggctttacgttatgaataagatcctgttgcaatgcgacaacctgtgcaaacgctatcaggaaggcagtgtgcaaaccgatgtgctgcacaatgtcagtttcagcgtcggcgaaggtgaaatgatggcgatcgtcggtagctctggttccggtaaaagtaccttgctgcacctgctgggcgggctggatacgccaacctccggcgatgtgatttttaatggtcagccaatgagcaaactgagcagcgcagcgaaagctgaactgcgcaaccagaagctgggctttatttatcagtttcaccacctgctgccggattttaccgccctggaaaacgtggctatgccgctgctgattggcaagaaaaagcccgctgaaatcaacagccgtgcacttgagatgttaaaagcggtggggctggatcatcgtgcgaatcaccgcccatctgaactttctggcggcgaacgccagcgtgtggcgattgcccgtgcgctggtgaataacccgcgcctggtactggcggatgaacctaccggtaacctcgatgcgcgtaacgccgacagcatcttccagttgcttggggaattgaatcgcttgcagggcaccgccttcctggtggttactcacgacctgcaactggcgaaacgtatgagccgccagttagaaatgcgtgatggtcgtctgacggcggaactgagcctgatgggggcggagtaatggcgatgcctttaagcttattaattggcctgcgttttagtcgcggacggcggcgcggcggcatggtgagcctgatctccgttatttctaccattggcattgccctcggcgtggcggtattgatcgtcggcttaagcgcgatgaacggctttgaacgcgaactgaacaaccgtattctggcggtggtgccgcatggtgaaatcgaggcggtggatcagccgtggactaactggcaggaagcactggatcacgtgcaaaaagtgccgggtattgccgctgccgcgccgtatatcaatttcaccgggctggtggaaagtggcgcgaatcttcgcgcaatccaggtgaagggcgttaacccgcaacaggaacagcgtctgagcgcattacccagctttgtccagggcgatgcgtggcgcaattttaaagcgggcgaacagcaaattatcatcggcaaaggcgtggcggatgcgctgaaagtgaagcagggggattgggtgagcattatgatccccaacagcaatcccgagcataaactgatgcagccaaaacgtgtgcgtttgcacgttgccggtattttgcagttgagtggtcaactcgatcacagttttgccatgatcccgctggcggatgcccaacaatatcttgatatgggttccagcgtgagtggtattgcccttaaaatgacggatgttttcaacgccaataagctggtacgcgatgcgggtgaagtgaccaacagctatgtttatattaaaagctggattggtacttacggctatatgtatcgcgatatccaaatgatccgcgccattatgtatctggcgatggtactggtgattggcgtggcctgtttcaacatcgtctccaccttagtgatggcggtgaaagacaagagtggcgatatcgcagtattaagaacgctgggggcgaaagatggtttaattcgcgccatctttgtctggtatggattgctggcagggctgttcggcagcctgtgtggtgtgattatcggcgtagtggttagtctgcaacttaccccgattattgagtggattgaaaagttgatcggtcatcagttcctctccagcgatatctattttattgatttcctgccaagcgaattgcactggctggacgtcttctacgtactggtcacagcattgttgctgagtcttttggcaagttggtatccggcgcggcgcgccagtaatattgaccctgcgcgagtccttagcggccagtaaaggcagtacattaaaacaaggagcggcaatgtattacgggtttgatattggtggaacaaaaattgcgcttggcgtgtttgatagcggtcggcagttgcagtgggaaaagcgggtgccgacaccgcgtgacagctatgacgcatttttagatgcagtgtgtgagctggtagctgaagctgaccaacgttttggctgtaaaggttctgtcggcatcggtattccgggaatgccggaaacagaagatggtacgctgtatgccgccaatgtccccgctgccagcggtaaaccgctgcgtgccgacctgagcgcacgtcttgatcgcgatgtacgccttgataacgatgccaactgttttgcccttagtgaagcctgggatgatgaatttactcaatatccactggtgatggggttgattctcggcaccggtgttggcggcgggctgattttcaacggcaaaccgattaccggtaaaagctacattaccggcgagtttggccatatgcgtctgccggttgatgcgttaaccatgatggggttggatttcccgttacgccgctgcggctgtggtcagcatggctgcattgaaaattatctgtctggtcgcggttttgcgtggctgtatcaacactattatcatcaaccgttgcaggctcccgaaattattgcgctttatgatcaaggcgatgagcaggcaagggcgcacgttgagcgttatctggatttattagcggtttgtctgggaaatatcctgaccatcgttgaccctgacctggtcgtcattggtggtggcttaagcaatttcccggcaatcacaacgcaactggcggacaggctgcctcgtcatctcttacctgtagctcgtgttccgcgcattgaacgcgcgcgccacggtgatgcgggaggaatgcgtggtgcggccttcctacatctaaccgattaaacaacagaggttgctatgctgagccgtcggggtcatcggttaagtcgttttcgtaaaaataaacgccgcctgcgcgagcgtttgcgtcagcgtatttttttcagagataaagtggtgccggaagcaatggaaaaaccaagagtactcgtactgacaggggcaggaatttctgcggaaagtggtattcgtacctttcgcgccgcagatggcctgtgggaagaacatcgggttgaagatgtggcaacgccggaaggtttcgatcgcgatcctgaactggtgcaagcgttttataacgcccgtcgtcgacagctgcagcagccagaaattcagcctaacgccgcgcatcttgcgctggctaaactgcaagacgccctcggcgatcgctttttgctggtgacgcagaatatcgacaacctgcatgaacgcgcaggtaataccaatgtgattcatatgcatggggaactgctgaaagtgcgttgtagtcaaagtggtcaggttctcgactggacaggagacgttaccccagaagataaatgccattgttgccagtttccggcacccttgcgcccgcacgtagtgtggtttggcgaaatgccactcggcatggatgaaatttatatggcgttgagcatggccgatattttcattgccattggcacatccgggcatgtttatccggcggctgggtttgttcacgaagcgaaactgcatggcgcgcacaccgtggaactgaatcttgaaccgagtcaggttggtaatgaatttgccgagaaatattacggcccggcaagccaggtggcgcctgagtttgttgaaaagttgctgaagggattaaaagcgggaagcattgcctgatgcactacgcttatcaggcctgcaaggggacgcaattaattgaatttgcgggttttgtgggccggataaggcgttcgcgccccatccggaataatacacgcgcacttttccggcctcttttatcgtttactcgtcaataacaatgcggcaataaacgtacagacaccaattagccctgcccagagtgggcttattctggtaatcgcaaagctattatcgatatacaaacataaagcctgataacccatattggcaatagtcatcgccactgcaaattttaacgcataaataaaacgagtcgtgtagtaaaagatcctggaaaataagataaacgtcgcagcccaggcgataaaacctaatgtgttggtgctgccggggggagcattttcatgctgttgtcctggatgcggataatacgttagtggcggcgtgctttgttttaatatctgtgcttgtagaacagccaatgcattattgattccctgataccagagatctgcatttaaataagccagcgtgtgattttctatcagaaggccgagatgtttatcgtccagaccactttcaacctggccgttggtgatcataattaaccgtggttcgcgggtagtaaatagtaacagaacacttccttttacatcactcaaactagaactcgcatgcgccagcatcgctttaccattttgtctgagactggcttcattattaatgtcgggtaaaaccacaataaacggtgcaattcccgtttgttggcgaaaaagctcggctttatgcgcgatctcttcagcatctggtacagtaccggtaacgtccgtaaaaagtgtcttcattattggaattaatggcttgctggctgctgtcagaggcaggagtatcagtaaactgagcagtataatgaattttttcatgggcgggacttccgtttcctgcgactttttttagaggagggcatacttattaataaaccgacggcgataaaaataacgcccataatgccgataaacccccatttaaaaaaattaacccacgggttatttatctcagccttttcaggatgcccgggagaataataaacattaactttatcgccttcgctgtcttcataaaaatcgctgccgatactgctattgaaaattagcgtgtaatctggcgtcggtcgaaaggcaacgacgggataccagctaccatctttacccgtgcgatgagaatgactggagtgccagacggtatcaacaatgacgccttcggtatgaatcgcgtctttgctataggtgaactggttataaaagacaacaacagaaatgaggatcagtaccagaccgataccgaggaatatacgaaagaaaactttactgtcctgactcattagccacatccttgctaactaaaaaacgggcggtaataccaccgcccgcttgctgaattaacgtcctgctttcagcttctgataatactcttcataaatgctgctggctgcgccaacgtcattctgccattcgccatttttaatggtttcagcatccgggtagagtgttttatcgttcgccacttctggacttaacagcttacgcgccgcaaggtttggcgttggataaccgatagtttcagcaacctgttttgccacatccgggcgcagcaggaagttgatcaatttcagcgcgccttctttgtttttggcatttgccgggatcgccaggctgtccatccagaaaatgccgccttctttcggccacaccacgtcaattggcgtacccgcctggcgtgcaacgaaagcagaaccgttccagatcatgccgaggttaacttcgccttccatgtacgggttcgccgggttatcggagttaaaggctgccacgtttggcatcagttttttcagctcgttatatgcagcttcaatctctttcggatcggtggtgttaccggagtagcccagcttacgcagcgccatctggaacacttcacgggcatcgtcggtcaacagcaggctgcctttgtactctggcttccacagatcggcccagctggtgacagatttcggatccaccgcatcaccgttaacaccaatcgccgtcgcaccccagatatacggaatggagtagtcgttattcgggtcaaaaggcttgttgagcatgtctggatcgagattgctgaagtttgttaacttgctcttgtcgatcttctggatcatcccttctttacgcattttatcaacgtaataggtactaggaaccaccagatcataggcaccgtctttgtatgttttcagcttggcgtacatggtttcgttgctctcgtaagtgctatagataaccttaataccggtttctttggtgaactgttcaagcagtcctggcggcacgtactcggtccagttgtagaaatacagcgtgttgttgtcatcggcgtgagcggcgctcatgcccagtgccagagcacccgccgcgagcaggtggcgactccattttttcatttaacgtcccctgtgttacctttcgttttatcacgagcaataagctggctggcaataaccatcaccaggctcagcaccagtaatatggttgccagcgcgttaacttccgggcttacgccgactttgaccatgctataaatttttaacggcagaatttcataacttggtccggtgacgaagctagaaactaccacatcgtccatgctcagggtaaagcttaacacccagcccgccgccaccgctggcattgccagtggcagaatgatttttcgcagaatggtaaattcgctggcaccgagatctttcgccgcttccagcattcgcacgtcaaaacctttcaggcggctatacaccgtcaccaccacaaatggcaggcagaaggtgatatggctgaacagcaggctccagaagccaagctgaatacccagcagcataaacagcaccagcaggctaatcgccatcacgatatctggactcatcatcaccacaaacagcattccgctaacgaacggcttaccacgaaagcgataacggtacagcgcaactgccgtcagactaccgataagcgtagcaaacgtcgcgctaaacaccgccattgttagactatgctgcgctgcctgtaacaggctgtcgttgttcatcagcaggctataccatttggtggtaaagccctgccagttgatgccaaagcggctgctgttaaaggagttcacaatcaaaataatgattgggatatacaggtacgcgtagatagcggtcataaaaccgccgcgaagcagtcgaccgatcattcgagttccaccttcttattcagcaaacgagaagcgcgccagtaaaccagcaacatcaggcccattacgatagtcagcgtaatgctggtagctgcaccaaacggccagtcacgaatattaaggaactggaccttgatgacgttaccgatcagcaggtttttcgcaccgcccatcaggtcggatacatagaacaggcccatcgctggcagcatcaccagcagacatccggcaataattcccggcatcgtcagtggaataatgatacggataaaagtctgtaacttgctggcaccgagatcgcgcgccgcctcaagcaacggcttatccagtttttcgatactggagtacagcggcatcaccataaacggcagcagaatgtaaaccagaccgataatcaccgcactgggcgtgaacatgatacggattggtgtgtcgataacgcccagccagagcaaaaactcgttgagatagcctttggtgctgaggaaaattttcagcccgtagatacgaattaaactgttggtccagaacggaacaatcagcagaaacagcagcagcggacgcaccttgtgtggcaacttcgccagaaaccaggcaaacgggtagcccagcaccaggcaggcgagggtggcgatcagcgccatattcaggctgtgcaatagcacttcaaaatagagcggatcgagcagacgcgtgtagttatccagcgtaaagaccattttgacaaaactggcgtcgtcgcgggtcaaaaagctggtgccaatgatcatcaggttgggcagaaagacaaacaacacaagccaaccgacaatagtgacaatcactacattctggaacttacttgtgttcttcatcagccagtacgacctcccagctttctacccaattaatggccattttttggtcgagagagtggtcaaagtcaggatcgtcttcattgaagaattcgctgaccatcaccatcttgccattttccagttcaacaacgctctccagcgtcatgcctttgtagttacgctcgcgaacgtaaccaatcagcccttcagcgtggttgtcgtcgttaatctcttcaacacgtaagtcttccgggcgcagcagaacatgcagtttttgccccggttcaacggcgaagttaacgtagatattacattcgcggccttcaacgttggcgcgtacgcgctgctcgtctagacgttcgatgacagtggcgttaaacatattgatttcgccaatgaagccggcaacaaacaggtttttcggctcttcgtagatttcacgcggcgtgccgtcttgctcaatgcgaccatcgcgcatcaccacaatcctgtcactcatggtgagtgcttcttcctggtcgtgagtcacaaagacgaatgtaatgccaagcttacgctgtaacgctttcagctcgttctgcatttgcttacgcagtttgtaatccagcgcactgaggctctcatccagcaacaacagacgaggcttgttaaccaccgcgcgagcaatggcgacgcgttgctgttgaccaccagagagctgatgcggtttgcgttgagcgaaggtttccaactgcaccatccgcagggcttccatcacgcggggcgtaatttcagcagcgggggttttttgcatgcgcaacccaaaggccacattttcgaacacggtcatgtgggggaaaagtgcgtagctttggaaaacagtgttcacatagcggttttccgccggaacgtgggtgatgtcctcgttatccagcatgatgcgtccggaatcaacagtttccagacctgcaatcaggcgaagaacggttgttttaccgcagccagaagggccaagcagcgtgaggaactcgccattgttgatagtcagatccagctggggaatgacctctttaccatcaaagcatttgcgaattcccgccaattgcaccagcggactaaggctactcggttgtttattcaattttttactctgtcccatgtaaacgcaacggatggcttaccgatgcggggtttgtggttaaccaccttggtgactcttaatgagggcggtaattctacggcaaaccgcttgaatcgccaatctttgttgtgaattactggcttagctttatattcattaaggtaatgctgataaatattcccgcttgcaggggtaaaagtgacctgacgcaatatttgtcttttcttgcttcttaataatgttgtcacaaaaagtgagggtgactacatggataaactacttgagcgatttttgaactacgtgtctctggatacccaaagtaaagcaggggtgagacaggttcccagcacggaaggccaatggaagttattgcatctgctgaaagagcagctcgaagagatggggcttatcaatgtgaccttaagtgagaagggcactttgatggcgacgttaccggctaacgtccctggcgatatcccggcgattggctttatttctcatgtggataccagtccggattgcagcggcaaaaatgtgaatccgcaaattgttgaaaactatcgcggtggcgatattgcgctgggtatcggcgatgaagttttaagtccggttatgttcccggtgctgcatcagctactgggtcagacgctgattaccaccgatggtaaaaccttgttaggtgccgatgacaaagcaggtattgcagaaatcatgaccgcgctggcggtattgcaacagaaaaaaattccgcatggtgatattcgcgtcgcctttaccccggatgaagaagtgggcaaaggggcgaaacattttgatgttgacgccttcgatgcccgctgggcttacactgttgatggtggtggcgtaggcgaactggagtttgaaaacttcaacgccgcgagcgtcaatatcaaaattgtcggtaacaatgttcatccgggcacggcgaaaggagtgatggtaaatgcgctgagcctggcggcacgtattcatgcggaagttccggcggatgaaagcccggaaatgacagaaggctatgaaggtttctatcatctggcgagcatgaaaggcaccgttgaacgggccgatatgcactacatcatccgtgatttcgaccgtaaacagtttgaagcgcgtaaacgtaaaatgatggagatcgccaaaaaagtgggcaaagggttacatcctgattgctacattgaactggtgattgaagacagttactacaatatgcgcgagaaagtggttgagcatccgcatattctcgatatcgcccagcaggcgatgcgcgattgcgatattgaaccggaactgaaaccgatccgcggtggtaccgacggcgcgcagttgagctttatgggattaccgtgcccgaacctgttcactggcggttacaactatcatggtaagcatgagtttgtgactctggaaggtatggaaaaagcggtgcaggtgatcgtccgtattgccgagttaacggcgcaacggaagtaagcgaaaagggatgcggcatgtgatgccgcatccggcttaaatccaaacttacccttcgaagaaccaatacccgctattgaccagcgccgcgagcatcgcgaggaaactcggatcttccagcgcatcgccaaaattctccgcagtcagcgcaatgttgctggcgagtgcatccagtgccggacggtgcggggaatcgatcttctcaccattggcatacacgtcgtcgccaatgcgcaatacgcgcagaccacccaggcgcaccagcacttcaccttgtttcagcgcatcgtagatttcatccggctgataaggcggctctggcggcgcgatatccagttcatgacgactctgggatataaactcgccaaaccattgcttaaagtgttccggctggttgatcaattcgagcatcatctcacgcagtttatccatctcttgcggcagaacatccgcaggatgagcgcgaggtggaacatccggatcgctgtagtagttgccgcccagttcacgttgcagcacataatcggcaaatccactaatcagttcccgcgtatttggcgcgcgaaagcccacggaatagttcatcgcattttccagcgcgtagccttcatgcgggaatcctggcggaatataaagaatatcaccaggctccagctcttcatcgatgatggcttcgaacggatcgacctgtaacagatccggatgtgggcagtgctgtttcatttgcagcttttcgcccactcgccagcgacgacgtccggtaccctgaatgataaacacgtcgtactgatcgagatgcgggccgacgccgccgccgggtacagaaaaagaaatcatcagatcatcaatacgccagtccggtagttcacggaacggtcgcatcagcgcggcggtcggctcatgccagtggttcactgcctgtaccagtaaactccagttggtttcaccgagatgatcgtagctttcgaacgggccgtggctgacctgccatttgccatcctggtgactgaccagtcgactgtcaacttcgctttccatcgccagacccgccaactcgtctggagagatcgggtcaataaaattattaaagccgcgttttaacaccaccgggcgtttctgccagtgacgttcaagaaaatcgggccagttaagagtgagttggtattccatgttaagcatccacaggctggtatctgcaaccgattataacggatgcttaacgtaatgcgtgaagtatgggcatatttattcatctttcggcgcagaatgctggcgaccaaaaatcacctccatccgcgcaccgcccagcatgctctctccggcgacgattttaccctcatattgctcggtgatttcgcgggctaccgccagccctacaccttgcccagggcgtaaagtatcaacccgttgaccacggtcgaaaatgacctctcgcttgcttaatggaataccggggccatcatcctcgaccacaatatagagatgctcgtcggtttgccttgcagaaatttcgacaaactcgaggcaatatttacaggcattatccagcacgttgcccatcacctcgacaaaatcgttctgctcaccgacaaagctgatctctgggctaatatcgagagagatattgacccctttgcgttgatacactttgttcagcgcactggtgagattgtccagcagtggggcgaccggatgcagctcgcggctgagcaatgtcccgccgcgcatactggcacgatgcaggtagtagccaatttgctgactaatgcggctgatttgctccagcattaccggctcagcatcactgacgctcatcttttcactacgcagagaacgcagcgtactttgcagcaccgccagtggcgttttcagactatgggtcaggtcggtgagcgtcgtacggtatttgtcgtaacgttcgcgttcactttttaacaatcggttcaggtttcgtaccagactggtcagttctcgcgttgtggctggattgagcaattcgcggttatgttcttccagttcgcggacttcttttgccagggcttcgatggggcgtaaactccaccaggcggcgacccacagcagcgggatcactaacagcagattggcactgagcacatagataaaccagctccagaccatataggaactttttagctccaccggaatggtatccaccaccacaatggttaattttggcatccggcttgttgccgggtagacgtttactgccacgctgtgggtcatctccgcgtcgtcatcatcttcccgcacttcctgcaactgttgctgtatgctatgatctccactcagcaagaggctggtatcgttaacatccgcttcaatttcatgaaaaccattgcttttcagccagtcaggctggatcatcttcatcagccagggcacgtcacgttgcgcccataaaagctgcccgttctcatcataaattagcgtcatggtggggctttgcttgtcgatattttcgggtaactcgacatgcaacttattgttttcccacttcgcaagggtatagaacagattgctctcgccacgtaacagccgaaacgtagttttatcgaaactgacgctataaccgatcagcgcgaccattccgtaggcaaggctaagcaccagtactaccgctgccgttgccaacagaaaacgtacccgcaggctgagcgggaaaaaaagacgcagtaattttttcatcagcgcaattcgaacagatagccctggccgcgaacggtggtaatcacttcttggggatattgtgcctgaatttttttgcgcagacgtcccatcagtacatcaatggtatggctttcccgcagctccgcatccggatagagttggagcattaagctatctttgctgaccactttgccattattgcgtatcaacgtttccataatagtgtattcgaacgcggtcagtttgatcacttcgtcattaatagataattcacggcgagagagatcaacctgaaacggggggaggctaatgacctgactagccagaccgctattacgccgcattaatgcctgcattcgcgccatcacctcttcaatatgaaacggtttagtcacataatcatcagcaccggcacttaatacttcgactttgtcctgccagctttcacgggcggttaataccagaatcggcagactaacatcgttgctacgccagcggcgaatcagactcagaccgtcctcgtctggcaatccgagatcgacaatcgcaatatccggtatatgttcattgagataataatcggcttctttggcatcttctgcgtcatcgacctgatgaccagcatcctgaatctgaactttaaggtggtgacgtaacaacgcattgtcttcaacaaccagtacgcgcatttttatttctccctgtcttaattattaaaatagtgtaacgcgattatgtggttatgggggtaaacattaaataaaccagcggggaggggaggtaaagtgaaaaaataaaaagcggataatcttaataagcaggccggacagcatcgccatccggcactgatacgaggtttatttcagctcatcaaccatcgtgatagctcgaccaatatagttagccggcgtcatcgctttcaggcgggctttctcttcttctggcaacgccagaccatcgataaactgcttcatgccttcggcgtcaacgcgcttaccgcgagtcagctctttcagcttctcgtacggtttttcgatgccatagcgacgcataactgtctggattggttcagccagcacttcccagttgtgatccagttcatccagcagatggtcacggttcacttccagtttgctcacgcctttcagggtggattgatatgcaatcaaggcataaccgatacccacgccgaggttacgcagcacggtagagtcggtcaggtcacgctgccagcgggaaaccggcagtttgcttgccagatgctgcaataccgcgttggaaaggcccagattcccttcggagttttcgaagtcgatcgggttaactttatgcggcatggtggaagaaccaatctcaccagcaatggttttctgtttgaagtggttaagggcgatataaccccagacgtcacggtcaaagtcgatcagaatagtgttgaagcgcgcaacgcaatcaaacagttcggcaatgtagtcgtgcggttcgatctgggtggtgtacgggttccactgaatacccaggctggtgacgaactcttcgctgaactgatgccagtcaacttccgggtaagcggcgatgtgggcgttatagttaccgaccgcgccgttgattttgccgaggatctccacctggttaagctggcggtactggcgctccatacggtaggcgacgtttgccatctctttaccgatggtactcggcgtggctggctgaccgtgggtacgagacagcagcgggatatcgcgatactgaacggcgagatctttaatgccatcaatcagttgacgccagtatggcaggatcacttcatcacgcgcggttttcagcattaatgcgtgggagaggttattgatatcttcgctagtacaggcaaagtggatgaattcagaaaccgcgtgcagttccgggatctccgccactttttctttcaggaaatactcaaccgctttaacgtcgtggttagtggtacgctcgatagttttgatgcgcgccgcatcttcttcgctgaaactggcgacgattgcatcaaggtaaccgattgcgtcggcagcaaaagcaggaacttccttgatcgctgcgtgcgcggccagtttttgcagccaacgtacttcaacttgtacacggaatttcagcaaaccatattcgctgaaaatcccgcgcagcgcgctgactttatcgccgtagcgtccatcgacaggggaaacggcggtcagactggataattccatagatcacaactccggggttaaatgagcaagaatttgttttgcctgagtggtcaggcgattacgagaaaacatcagttgcagacgtccgccgccgacctggtgccagagcacggcggcgcgaatgcctgccagcagggttgcgcgaactttcgcctgcacttgtgggctttgcagtacagcaggggaaccggtgacctgaatgcgcgggccaagcgggctaatcacatcaacatagatagcagccatcgcgctcatcagcgtttcggactgtaaatcgaagtgttcgagctggcgttgcaggccgttgatccggttgcccagagtgtcgagcgcgcctttcgcactggagagtttgcgctcaagcaccatcaagctgagtgtgtagcgggttaattcggcgtttaagccctggcgactgctggcattgagcacgccgagcagggtttccagcccgacgcgcaggttggcttcgctaccgccaaaaaccgccagcgtgctgctggggttcatatcaataatactgttgagactgacgtgtagcgcatcggcatcacaatgcccctggtgagcgagttgttgcaccaggcgtgcgctctgacaaataccggccagggcgagggtgatgtcatagtaattctttgccacgttcactgcttccttgttttaagtaaagataataatcagaccggcagcggcagacgctgctcaataataccgccaccgaggcacacttcaccgttatagaagacggcagactggcccggcgtcacggcggcaaccggttcatcgaaaatcacttcaatgcgatcatcgtccagcgccttgacggtgcaagggatatcggtctggcgatagcgggtttttaccgtgcaacgcatagtgccggtgaatggttcgcgatcgacccagtgcaactgctgggcaatcaacccgacagacatcagccgcgggtgttcatggccctgagcgacaaccagaatgttgttttcgacgtctttgtccaccacataccacggttcttcggtaccttctttggtgccaccgatacccagacctttacgctgaccgagagtgtgatacatcagcccctggtgctcaccaatttcatcgccatcgacggtaatgattttgcccggttgcgccgggagataacggcccaggaactcgcggaatttacgttcgccaatgaagcaaatgccggtagagtcttttttcttcgcggtgaccagaccaagatcttcagcaatcttacgcacctgcggtttttccagttcgccgaccgggaacaggctttgcgcaatctgctcatggctgagcgtataaaggaagtagctctggtctttattgctgtccagaccacgcagcaggcggctcttgccatcgacatcggcccgacgtacgtaatgaccggtagcgatataatcggcacctaaatcttcggcggcaaattcgaggaaggctttaaatttgatctctttgttgcacagaatatccggattcggcgtgcgaccggctttatattcggcaaggaacagttcgaagacgttgtcccagtactcggcagcaaagttaacggtgtgcagttcaatgccgagcttgtcgcagacagcctgggcatcagccagatccgctgccgctgtgcaatattcctcaccgtcgtcttcttcccagttcttcataaacaggccttcgacctgatatccctgttgttgcaacagccaggcagaaacggaggaatcgacaccgccggacatgccgacgattactttttttgcggtttcagacattggatcactcacgacattgaacttcaaggcggcgtattctatcacgcagccttttagatgacaccctttgtaaaaggccagttaaaatcgccaatcatctccagcggataacgttgcccgctttgataacaacgaatactttccgccaccagcgggctacgaagattactcgcctgtaaaatttcttcggcgctgacccaacggcagcagtcgatatcgctgtcatgaggctgggtcgggcatatttgctcaagctcaatggcaaagaggaaacgcaaaaacggcgttttatctggcgcaatccactgatgcatacgaataaagtgttgcggctgcgcgctgatgccggtttcttcccacagttcacgggcggcggcttccactaaggtttcatcggcttccagatgcccggcaggttggttccataacgctttaccattaatcgtctcttcaacgactaaaaatttgccttctgcgtgcaccacgcaagcaacggtaacgtgcggtttaaacattttgcatccttaatctgtcacttctcgccattcaccattggcaagattatccaaagagtaatcacccatcgcatagcgaatcagtcgcagcgtggggaagccaacatgggcggtcatgcggcgcacctggcgattacgtccttcatataaggtgatcttcagccagctggtgggaatacttttgcgttcacgaattggtggattccgcggccataaccacgcgggttcgtcaaccagctccgcgccggcgggcagggtagggccatcatttaaggttacgccattgcgcaaggcttcaagtgcgtcttgtgtgggaataccttccacctgcacataatagatttttccggtgcgtttacccggctgggttaaacgcgcctgcaacgcgccgttattggtcagcaccagcaacccttcgctatcgcggtcaaggcgacctgctgcataaacaccctgaaccgggatgaattcttttaatgttttgcgtccggcttcatcggtgaactgcggaagaacatcgtagggtttattgaacaggatcacacgcgtgggctggttttcaggtttacgcctggtagaacgttggctgctgaatcgcttaacctggtgatttctaaaagaagttttttgcatggtattttcagagattatgaattgccgcattatagcctaataacgcgcatctttcatgacggcaaacaatagggtagtattgacaagccaattacaaatcattaacaaaaaattgctctaaagcatccgtatcgcaggacgcaaacgcatatgcaacgtggtggcagacgagcaaaccagtagcgctcgaaggagaggtgaatggaaagtaaagtagttgttccggcacaaggcaagaagatcaccctgcaaaacggcaaactcaacgttcctgaaaatccgattatcccttacattgaaggtgatggaatcggtgtagatgtaaccccagccatgctgaaagtggtcgacgctgcagtcgagaaagcctataaaggcgagcgtaaaatctcctggatggaaatttacaccggtgaaaaatccacacaggtttatggtcaggacgtctggctgcctgctgaaactcttgatctgattcgtgaatatcgcgttgccattaaaggtccgctgaccactccggttggtggcggtattcgctctctgaacgttgccctgcgccaggaactggatctctacatctgcctgcgtccggtacgttactatcagggcactccaagcccggttaaacaccctgaactgaccgatatggttatcttccgtgaaaacagcgaagacatttatgcgggtatcgaatggaaagcagactctgccgacgccgagaaagtgattaaattcctgcgtgaagagatgggggtgaagaaaattcgcttcccggaacattgtggtatcggtattaagccgtgtagcgaagaaggcaccaaacgtctggttcgtgcagcgatcgaatacgcaattgctaacgatcgtgactctgtgactctggtgcacaaaggcaacatcatgaagttcaccgaaggagcgtttaaagactggggctaccagctggcgcgtgaagagtttggcggtgaactgatcgacggtggcccgtggctgaaagttaaaaacccgaacactggcaaagagatcgtcattaaagacgtgattgctgatgcattcctgcaacagatcctgctgcgtccggctgaatatgatgttatcgcctgtatgaacctgaacggtgactacatttctgacgccctggcagcgcaggttggcggtatcggtatcgcccctggtgcaaacatcggtgacgaatgcgccctgtttgaagccacccacggtactgcgccgaaatatgccggtcaggacaaagtaaatcctggctctattattctctccgctgagatgatgctgcgccacatgggttggaccgaagcggctgacttaattgttaaaggtatggaaggcgcaatcaacgcgaaaaccgtaacctatgacttcgagcgtctgatggatggcgctaaactgctgaaatgtagtgagtttggtgacgcgatcatcgaaaacatgtaatgccgtagtttgttaaatttattaacgggagcgtaacgctcccgttgttttttgttaggctgctaacggttatcaaaattttatcaaaaaaagttatcaaaacccctcggtagttttggggtaggctggccggtcaggtggtagttctactactagtctcccacatagatattccttagctttttattattgctggcggacgctcgttaatatttaaggtcttcattgattaagacatccccaaagttagttatgtattcactgttattaggacaattatgaattaccactccttacacccgctcaaatattgttaaattgccggttttgtatcaactactcacccgggactcgccaggggacagccaacaggcattgggtgcaatcaccttagcgttcaggtacatgcggaatgtaaaaaaggccgcgagcgcggccccttcacatacatctttagtactgagactgtttaacctagggaattattatcgtattatattgcattacaactcccaacagtgacatatgaacttcctgctttactccacgactttaatatttcaaggccatgtgaagaacatatttcttgcactgcgagttcatcgagtaatccatagtaagaaacactttttgaatttttgtaaatgtatccgtaaagatgttttcttcctgtttcgtattttttgaagtatgagcttttatattgatttacaataagagtctcacctcctgattttagtaatctcttgatgctaagaactatcagataattcaaagcgtggctgtgatgataggaattatgttttttacgtgaatgagaataatcttaaatgaggaataactcattgattgacaatatttttattcaagaagtgtcattgactgttaacgcaatgttgtaaaggtaagataatctgatttatcaatattattgtgtgatttttatgtgagcagaagatattcatcagcaacgattacattagtcattttattttgccgacggcctcattgtcgaaagataagcgtacgacagtattatcagaaaagagtgattttttatccaactacacttcagcgcactgcgtgtaaaaaatgcctctttcttatgcgggatatcatcatttcatcatgatgtctttggtgagcggtgaacacaatgcacctgcgctgtctcttcaggatgaatcccctggtctggtgcctgcgggctgatgttgcagcagagcttaggagtcttagacgctactatcatttatccaatggcatggaaagcaaaagtgtcgatacccgcagtatatatcgtgaactgggtgcaacgctgagttacaacatgcgcctggggaacggtatggaaatgaaccctggctgaaggcggctgtgcgcaaagaatttgtcgatgataaccgggtgaaggtgaataatgacggtaatttcgtcaatgatttgagcggcagacgtggaatataccaggcagctattaaagccagtttcagcagtacgtttagcggacatctcggggtggggtatagccatggtgccggtgtggaatccccgtggaacgcggtggctggtgtgaactggagcttctgaccatcaacgattaaactgcgcttcggcgcagttttcgtttacaggatgttgaaagggaaaattctggggcaaaaaaagcccgccagttacggcgggaaacctcatcctatgggagaacaatgaataatgaaattgcggggttatcatctcccagtatatccatactaacaataaggttatttactcaaccaggcataaacattttgttttgtgcgtgggaacagccttaaggtgtaaagggggaggtggaaatagcaatgaggagtatcagcaagaatactcgccgctttaccacaacgtggatgagagggatgaaaaactcaaggcagagataactctgccttgaagataaatgcgcttttacagcgggcttatttcagctcttctgcttccggtaaggtcacgttcagctcaagaatagaaatatcgccatctttttgctcaagctgtacggttaccatctcaggatcaatttgtacgtatttacaaatgacctcaagaatatctttacgcaactgcggcagataatgcggttctgcatcgctgcgacggcgttcagcaacaataatctgcagccgttcttttgcaatgttggctgtgtttttcttccggctgagaaagaaatcgagtaatgccataacttatcctccgaacaagcgtttgaggaagcctttcttctcttcttcaatgaagcggaaaggacgttcttctcccaacagacgttctacggtatctgcgtaggctttacccgcatcggcgttaatgtcgagaatgaccggttcaccctggttagaggcgcgcaatacactttgatcctctgggatcacgccgacgagtttgatgcgcaggatctccagcacatcttccatgctcagcatgtcacctctgcttacgcggcctgggttatagcgcgttaacagcaggtgctctttaataggctcttcgccattttctgcgcggcgacttttgctcgccagaatgcctaaaatacggtcagagtcgcgtacactggagacttccgggttggtggtaataatggcttcgtctgcaaaatagagtgccattaacgcaccggtttcaatccctgccggggagtcacaaacgataaattcaaaatccatcgctttcagatcatcaagaactttggcgaccccttcacgggtgagggcatctttatcgcgtgtttggcttgccggcagaatatagagattttcagtacgcttatctttaattaacgcctgatttagcgttgcatcgccctgaatgacgttgacgaaatcgtaaacgacccggcgttcacaacccataatcaggtcgagattacgcaggccgatatcaaaatctatcacgacagttttctttcccttctgggccaaaccagtggcgatggccgcgctggaggttgtcttaccaacaccccctttgccgctagtaacaacaataatgcgtgccatagaaattccttgttaaaaagggatcaatttaacggttgaacggtcaaagcgttttcgactaactgcagtcgcgccgctttgccataaaattctgctgggatttgatcactcagccagtattcacctgcgatggacaccagttccgccatcaggttcgtacaaaatatttgcgtttcccggtcaccacttgcccctgccagcgcacgaccgcgcatcatgccatagacatgaatgttcccatcggcaatcaattcggccccagcgctaacgtggcttgtaacaatcagatcacattgtggagcataaatacgctgaccggaacgcaccggggtatctattaaacgcgtttttgtgaccggcgttgtattttgcgctggagcctgcggtgtgggagctggacgtggcgctttttcctttccttccgtcaggataggcagccccatcttttcaatttcggctttaagttgcgcatctttgcagccacttacgccaataacccgcaaaccggttgcgctaaccgccttatgcatcgcactccagtttaccgggtcttccagtgcactgacgttgagtacaacgggggcatgttttaaaaatgcgggggcctgagcgattttgtcttccagcgcctgatggataaccttaggttctgcctcatgcagatgaaccacagataaagtgaagctactgcctttaagctcgattggcgtgttactcatcctggccttactcaattagctattaatcatcgccagcgcgcgatgatgttccgaagactataaggcatgttatagtctggattatattgaggcaagtcaccctcccatttattcagagtaaaagtctattctgtgataaatggcgctgattcatagcttaaaaaatacccttgtcaatcaacccattgccgtcgtacttttgattgttcttatttacgcttcctttttccgcaccctaatcgtgacagcatctccagacctgtttaaatatccagtattgaggcaagtgtattttttcaccacgccaggctttcttaactttccattttttgcggcatcattaaagaacagatacccgttatcttaatatccgccacagaattgctctatcatagaaaccgcagaagacgtctgatacttctgtcaggtcatcgtaactcgtccaggtcagcggttttgattacggattgatgatgaaatgagcataagtgttgtacggttggattatcaggatgtgctatgaatatgatgcgtattttttatatcggattgagtggtgtggggatgatgttcagtagtatggcgtctggaaatgacgctggcggacttcaatctccggcgtgcggcgttgtttgcgacccgtatatttgtgtgaacagtgatggcatttccccagagttaacaaggaaatatctcggcgaaaaagccgctgaaaacttacaaagtttacaaggctacgatcccagcgaatttacattcgctaacggtgtattttgcgatgttaaagaaaaattatgtcgtgatgatcgttattttggtgtggatggtaagcggagtggaaaaatcaatcaaaccaccacaaagatgttatttatgtgtcgtgagtgatgtcttgtttacattatgttctattcgtcattaacctcttgagcgacagagaggagtggggcattaacgtttatgacggggagagtccccgtcggttgacatttacttaatttgaatatcgacgttatattttttagttttgtttttacgggcgtcgtttcgggtttgcaacactcgcagctcatatttgccagaagcagggagactgtattgtccgtgactatcgagttctggggaatatctggataaatcaacactatcatcgattcctggcccgaagaggtaagtatcagcgccttcattagagatactcacatgcactttctgaccttttttggcatagaaggtatatgtatcgtaatcgtatccctttatttcgccggagtactgagcgctgctatggccttttctgaactcaacattgacattcttacccgcagcaaagctcgtggaggttagcagtgcaagcagcaatacagccttcctgatgctcttgattttcattggtagtctcctgttcagaatgagtacgatgaactgttataatataacaatccctaacgggagaattccagtggctttcctgcgttcggtaaaatcacgttgcggcatttttgccggggggattacttataaagggggcatggactcaacaaaccgtagaaatctacagctggctggcttgtggcgcgggtttcattgatgttagcttatgccaaaacctggcatcttaaagagtaaaagtatgttttgtgtgatttatcgaagcagcaagcgtgaccagacctatttatatgtcgaaaaaaaagacgattttagccgtgttcctgaggaactgatgaaaggttttggtcagcctcagttagcgatgattctgccgctggatgggcggaagaaactggtcaatgccgatattgaaaaggttaaacaggcattaaccgagcaaggttactatttgcagttaccgccaccacccgaagatttgctgaagcaacatctttccgtcatggggcagaaaacagacgacactaacaaataaccgatatccggcggtggcattatctttgtcggcgcgggttttcatatccacgataaggtgaggggaacgttatgtatcaacatcacaactggcaaggtgcgctgctggattatccggtgagtaaagtagtctgtgttggcagtaactatgccaaacatattaaagagatgggcagcgcagtgcccgaagagccagtgctgtttattaaaccagaaacggcactgtgcgatctgcggcagccattggcgatcccatccgatttcggtagtgttcatcatgaagtcgaactggcggtgttgattggcgcgacactgcgtcaggctacggaagagcatgtccgcaaagccattgccggttatggcgtggcgctcgatctgacattgcgtgatgttcagggaaaaatgaagaaagccgggcagccgtgggaaaaggctaaagcgtttgataactcttgtccgctttccgggtttattcccgcggcggaatttaccggcgacccgcaaaatacaacgctgagcctgagcgtaaacggcgaacaacgccagcaaggtacgactgcggacatgatccataaaatcgttccgctgatcgcttatatgagcaagttttttaccctcaaggccggtgacgttgtgttgacaggcacgcctgatggcgtcggcccgttgcaaagcggtgatgagctgacagtcactttcgatgggcattctttgacaactcgcgttttgtaatactttttgccgcctgaaagcggcggcaaaacttgcatcgctgtgccagactggttataaggtgcgttttaacgtaatggcggaacacctgatgagcgatgtacctttctggcaaagtaaaaccctggacgaaatgagcgatgcggaatgggagagcttgtgtgatggttgcggtcagtgttgcctgcataaactgatggatgaagacaccgacgaaatctacttcactaacgtcgcctgtcgccagctcaatattaaaacctgtcaatgtcggaactacgaacgtcgtttcgagtttgaacccgactgcattaaattaacccgtgaaaatctgccaacattcgaatggctgccaatgacctgcgcttatcgtttgctggcggaaggtaaagatttacctgcgtggcatccgctacttactggtagcaaagcggcaatgcatggtgaacgtatctctgtgcgtcatatcgcagtgaaagaaagtgaagtgattgactggcaggatcatatcttaaataaacctgactgggcgcagtgataaatttaatagatgctgatgggggctttcttaatatacgtctggatgctcgccatttcgtagccctgtttttgaaagcgctctgtcataatgagagttacccgataccttattatcaacaggtaactctcaatctttaaaaaacgtctgtgtttttaaatgtgataaaccttataccttgagtacatggagagaataatcgcttatcagacttcaggtacctcaaagagtgtctttttaccgtgtcttttctgatactcattacaggtgttaatcatttttttggccgcttcttttagcaaagaaagcattaaatcatcataatcaacgtagaatctggttgtttcagtttccgtttttatctcaccgatggcggctatttcggtggttaatttcaatttggcggcatcgatatctttattcgcttgtttaaccgtgttagacagggtggtaaagaaattctgcacagattttaacttgttcttcaattctggaatcagttttccttcaactacgcccgcagcaatagaataggaaatgattaatccaaatggaccggcgacgacaccggctgcggcaccggcatatgcttccttcctgattttatctacctgactctggaaatagctgcttttttcactaaaatcattggttaactggctatctaacgccagcagtttcccggaagcgttgttgaaactttgactgcttaccagcagggatttttgcgcttcattcagcttcgtgatgccgtcatccagtaccttaatgagaatgtctttctgggcggatgctttcttctcattgtactcatcaaatagcaaaatatacgctgcgagcaattgcgtcgcaacaccacaccattcatacactgtttgggttgcttcaaaatacttatcctggctatccataagtaaggttttaatatcgccgactaaaacggaggctgcctgactatactcctgtttaaagcgacttaactcttttatggtttcatcaaaggtctgccaggggatgacctgatcgagatatttattataaagatctaatgctccatctgcggtttcgattgcgtttttaactacttctaccgttttatctgcaacgatttcagtcataatcattcgcctctttaaatatataaattgtaatgaaactcctgttttacaactattaataaattttacttcatctaattcatagttagccgggcgggatgcgtcaatgtctttatttctattaatatgataaatatcaaacaatgtttaatgtcattatggcgaatgcttctattctattttttagccgggtgatatttttcatttctgctggatgagcgtcgtcgccagaaggccacgtgagcacaagataagagaacgaaaaatcagcagcctatgcagcgacaaatattgatagcctgaatcagtattgatctgctggcaagaacagactactgtatataaaaacagtataacttcaggcagattattatgttgtttatcaagcctgcggatctccgcgaaattgtgacttttccgctatttagcgatcttgttcagtgtggctttcctagtccggcagcagattacgttgaacagcgcatcgatctgaatcaactgttgatccagcatcccagcgcgacttacttcgtcaaagcaagtggtgattctatgattgatggtggaattagtgacggtgatttactgattgtcgatagcgctattaccgccagccatggtgatattgtcatcgctgctgttgacggcgagtttacggtgaaaaaattgcaactacgcccgacggtacagcttattcccatgaacagcgcgtacagccccattaccatcagtagtgaagatacgctggatgtctttggtgtggtgatccacgtcgttaaggcgatgcgctgatgtttgccctctgtgatgtaaacgcgttttatgccagctgtgagacggtgtttcgccctgatttatggggtaaaccggtggttgtgctaagcaataatgacggttgcgttatcgcccgaaacgctgaggcaaaggcgcttggcgttaaaatgggcgatccctggttcaaacaaaaagatctgtttcgtcgctgtggcgtggtttgctttagcagcaattatgagctttacgcagacatgagcaatcgggtgatgagcacgctggaagagctaagcccccgcgtcgagatttacagtattgatgaggcattctgcgatctgacaggtgtgcgtaattgtcgcgatctgactgattttggcagagaaattcgcgcaacggtgctacaacgtacccatcttactgttggtgtggggatcgcccagaccaaaacgctggctaagcttgccaatcatgcggcaaaaaaatggcagcggcagacgggtggggtggtggatttaagtaatctggaacgccagcgtaaattaatgtctgctctccccgtggatgacgtctgggggattggacggcggatcagcaaaaaactggacgcgatggggatcaaaaccgttctcgatttggcggatacagatatccggtttatccgtaaacattttaatgtcgtgctcgaaagaacggtgcgtgaactgcgcggcgaaccctgtttgcaactggaagagtttgcaccgacgaagcaggaaattatctgttcccgcagctttggtgaacgcatcacggattatccgagcatgcggcaggccatttgtagttacgctgcccgggcggcggaaaaacttcgcagcgagcatcaatattgtcggtttatctccacgtttattaagacgagtccatttgcgctcaatgaaccttattacggcaatagcgcgagcgtaaaactgctgacgcccactcaggacagcagggatatcattaacgctgctacgcgatctctggatgccatctggcaagcgggccatcgttaccaaaaagcgggcgtgatgctgggggatttcttcagtcagggagtcgcgcagctcaatttattcgatgacaacgcaccgcgccccgggagtgagcaattgatgacggtaatggatacactgaatgctaaagagggcagaggaacactctattttgccgggcaggggatccagcaacaatggcagatgaagcgagccatgcttagtccacgttatacaacgcgaagttctgatttactgagggtcaaataaatatagcggcaggaaaaaagcgctcccgcaggagcgccgaatggattagcgaccgaacagatcacgttttttcgctttaaacggctgggaaatcaccaccagcactgcgacaatcaggtaagcgataaaaataccgagcagccactgcggcatttccagacctaaaaaatcccactgacgctcggcgcaatcgccagaggcgacaaacacttgcggcacccacttatccagcggcagccattccgggaaacgaaccataaaatcacaggtggcaaacgggctaggatagagctgaagcatggtgtgctcgtaagttaactgcacaccgcggaacgcactatacaaccagataaccatcgctacataacgcagcggagttttcggggcgatcgcgccaatcagcgcagcacccagaacgccgaataacgcgcagcgttcataaatacagagcacgcaaggtttcagtaacatcacatgctggaaccacagcgccgtcagttccagtgccagagcagtaaacgccatcaacagccacgcgccccggccttgactacattggttcaaaaatcgcaacataatcatttccctgcaatatgcatagagtgcgcagtttaaaccaattcattcgctgcgccaccaggaggcagcaaaaataggacgcaattggacaattatcgggcgaaaaggcaaaccgggcatttgtatgcccggtaagttgttatcaaagcgttgctatccagcccatttgcataaaccattcggttacaggggcaagcgtaaactcgacgcagagcaagccgacgagtgtcaggacgagggtgtaaggcagggccatccacaccatgcggccataagagaggcgaatcaatggcgcgagtgcagaggtcagcaggaacaggaacgcagcctgaccgttcggcgtagcgacggagggcagattggtaccggtattaatggcgaccgccagcagctcgtattgcttcaacgtgatagcgccactttccattgccgctttcgcttcgttgatataaatcgtccccacgaagacgttatcgctaatggaactcagcagaccgttgaaaatatagaacaggctcagctgagcatgttcgcttgcctgcaacacaaactgaataattgggctaaacagttgttggtcgataatcaccgcgactacgctgaaaaacaccgtcaacagtgcggtgaatggcagagattcggtgaaggctttaccgatagcatgctcatcggtgacaccggtcaaacttgttgccagaataatgacactcaaaccaatcaagccaacttccgccagatgcaacgccagcgcagtcaccagccagacgccaataatcgcctggacaatcagacggattttatcctgacgggtacgctggtggcggctttgatcgtcaaactgttgcaacacttcgcggactttctccggcagcgtttcaccgtagccaaaccaacgcagcttctctaccagcaggcaggttaacaggccacaaatcagaaccggaacggtcaccgggctcatgcgcaggaagaaatcgccaaaatgccagccagccgctttagcgatgatcaggttctgtggttcgcccaccatggtcattacgccgcctaatgcggtgccgacaccggcatgcatcatcaggctacgcagaaagccacggaactgttccagaaccactttgtaatgcttgtcgatatgactatcgtcttgcaggtcggtgtcttcggtacgggaagaggctacgcggtgataaataccataaaaaccgactgcaacgctgatcaccaccgccacgacggttaaggcatcgaggaacgcggagaggaacgcagccgccacgcaaaaagagaggctcagcagcattttggagcgaatgcttaacagcaaacgggtaaatatgaacagcaacagctgtttcataaaatagatacccgccaccataaacatcagtaacagcaagacttcaagatttgccgccacctcttcacggacgtgttccgcgctggtcatgccgatgaataccgcttcgatagccaacagaccaccggggagcagcgggtagcatttcagggccatcgccagagtgaaaataaattccgctaccagcaaccagcccgcgacgaaagggctgatgaggaaaattaacgggtttacgattaagaaaatgatgagggcgagtttgtaccagtcgggggactggcccaaaaaattgcgccatagcgcgcggccccaggagatctccatgatggtttcccttaccttacaaataatcaatgatgtttttatgtttaaacgcaaagcttaacggtcaggcaggagtgaggcaagtcttgatagtcaaggggaaagagatgcggaaaatgaagccttgatccctttttcttctttttgtctgctatcagcgtagttagccctctggtatgatgagtccaactttgttttgctgtgttatggaaatctcactatggtcattaaggcgcaaagcccggcgggtttcgcggaagagtacattattgaaagtatctggaataaccgcttccctcccgggactattttgcccgcagaacgtgaacttagtgaattaattggcgtaacgcgtactacgttacgtgaagtgttacagcgtctggcacgagatggctggttgaccattcaacatggcaagccgacgaaggtgaataatttctgggaaacttccggtttaaatatccttgaaacactggcgcgactggatcacgaaagtgtgccgcagcttattgataatttgctgagcgtgcgtaccaatatttccactatttttattcgcaccgcgtttcgtcagcatcccgataaagcgcaggaagtgctggctaccgctaatgaagtggccgatcacgccgatgcctttgccgagctggattacaacatattccgcggcctggcgtttgcttccggcaacccgatttacggtctgattcttaacgggatgaaagggctgtatacgcgtattggtcgtcactatttcgccaatccggaagcgcgcagtctggcgctgggcttctaccacaaactgagcgcgttgtgcagtgaaggcgcgcacgatcaggtgtacgaaacagtgcgtcgctatgggcatgagagtggcgagatttggcaccggatgcagaaaaatctgccgggtgatttagccattcaggggcgataatcccttccgtttaaagagcaaacccctcaaacgaggggttttttgttgtttttacagatttcccattcttggcgggcaacgttccagcaactcgatgctgccgtcttcgttttgctgttcgagcatcacatcaaatccccacaggcgatgcacatgcttcaggacttctttgcgcccccgatccagcggtgcgcgattatgtggaatataacgcagcgtcaggctacggtcgccgcgcaaatccacgttccagatctgaatattcggctccagattacttaagttatattggctgcttaaccggttacggatctcccgataaccttcttcattatgaatagcggaaatctccagataattatgccgatcgtcatccagcacggtgaagaagcggaaatcacgcatcactttcggactcaggaactggctgataaaactctcatctttgaaatcacgcatcgcgaaatgcagcgtttccagccagtcggaaccggcgatatccgggaaccagtatttgtcttcttccgttgggctctgacaaatccgtttaatatcctggaacatggcgaacccgagggcatacgggttgatgccgctgtaccacgggctgttataggggggctggaagaccacattggtgtggctgtgcaaaaactccagcataaaacgttccgttactttcccttcatcatacagatggttaaggatggtgtagtgccagaaggtcgcccagccttcgttcatcacctgagtctgtttttgcggataaaaatactggctcaccttacgcacaatacgcaggatttcacgctgccaactttccagcagtggcgcatttttctccataaaatagagcaggttttcttgtggttcggacggatagcggcgcgcttcagcaaccgttttctcttcctcgcgcttcggcagggtacgccagagcatattgacctgactttgcagatactcttcgcgacttttctgccgggctttctcttcttgcaggctgattttttgcgggcgtttgtaccggtccacgccgtagttcatcagcgcgtggcagctgtccagaagccgttctacttcatcaacgccataacgctcttcgcactcggtaatatatttacgggcaaaaatcagataatcgacaatgctactggcgtcggtccagctacggaataagtaattgtttttgaagaaagagttatgcccatagcaggcatgagccatcaccagcgcttgcatggtaatggtgttctcttccatcaggtaagcgatacacgggttagagttaatgacgatttcataggccagtccttgctgaccgtgcttatacagccgttcagtctcgataaactttttaccgaaactccagtgcggatagttaattggcatgccgacgctggagtaggcatccatcatctgttcactggttatcacttcaatctggtgcgggtaggtatccagccggtagagtttcgccacccggtctatctctgccagataaacatccagcaggtcgaacgtccagtcgggtccatcgctcaaacgtgtggtgtccttattcatagaatcgatcgtcgccatacgcgcacctcattgttgtcggcgctctctgtgtggagcacctcatttcaagcatagaacacctgttaaaaaccgcgtcgccggagaatttttttctttgcgatttcttattatcagagtgccactaatccgcttctgaacggaattttatgctggataaaaagggcgttcagcaggagatactaaagacgccatattgccgcagagtcagggagatgtgagccagctcaccataaaaaagccgcatgttgaataatattttcaactgagttatcaagatgtgattagattattattcttttactgtatctaccgttatcggagtggctatgcgagttgtcatactgggaagtggtgtggtaggcgttgccagcgcctggtacttaaatcaggcaggacatgaggtcaccgtcattgatcgggagccgggggccgccctggaaaccagtgccgcgaatgccgggcaaatctcccccggatatgctgcaccgtgggcggcaccaggtgtgcctttaaaagcgattaaatggatgttccagcgccatgcgccgctggcggttcgtctcgacggtacgcagttccagttgaaatggatgtggcaaatgttacgtaactgcgacaccagccactacatggaaaacaaagggcggatggtgcgtctggcggaatacagccgtgattgcctgaaagcattgcgcgccgaaaccaatattcagtatgaagggcgtcagggtgggacgctgcaactgttccgtaccgaacaacagtatgaaaatgcgacccgcgatatcgccgtgctggaagatgccggcgtaccgtatcagctgctggaatccagccgcctggcggaagtggagcccgcgctggcagaagtggcgcacaaactgacgggcggcctgcagttacccaatgatgaaaccggagactgtcagctatttacccagaatctggcgcggatggcggagcaggcgggggttaaattccgctttaatacgcccgttgaccaactgctttgcgacggcgagcaaatctacggcgtgaagtgtggcgatgaagtgattaaggccgatgcgtatgtgatggcgtttggttcttacagcacggcgatgctcaaaggcattgttgatattccggtgtatccgctgaaaggctacagcctgaccattccaattgcgcaggaagatggtgcgccggtatccaccattcttgatgaaacctacaaaatcgccattacccgtttcgataaccgcattcgtgttggcggaatggcggagattgttggttttaataccgagctgttgcaaccgcgtcgtgaaacgctggagatggtggttcgcgatctctatccacgcggcggtcatgtcgagcaggcgactttctggactggtctgcgcccgatgacgccagacggcacgccggttgtcgggcgtacacgctttaaaaatctgtggctgaataccggtcacggcacgctcggctggacgatggcttgcggttccggtcagttgttaagcgatctgctctctggtcgcacgccagcgatcccatatgaggatctaagcgtagcgcgctacagccgtggatttacgccaagtcgtccgggccatttacatggcgcacacagctaaggaaacgagatgacccgtccgatacaggccagcctcgatctgcaggcattaaaacagaatctgtccattgtccgccaggccgcgacgcacgcgcgcgtctggagcgtggtaaaagcgaacgcttacgggcatggtattgagcgtatctggagcgcgatcggggccaccgatggctttgcattgcttaacctggaagaggcaataacgttacgtgagcgcggctggaaaggaccgatcctgatgctggaaggatttttccatgctcaggatctggagatttatgaccagcaccgcctgaccacctgcgtacacagcaactggcagctcaaagcactgcaaaatgcgcggctaaaagcaccgttggatatttatcttaaagtgaacagtgggatgaatcggttgggcttccagcccgatcgcgtgcttaccgtctggcagcagttgcgggcaatggcgaatgttggcgaaatgaccctgatgagccattttgccgaagcggaacatcctgatggaatttccggcgcgatggcgcgtattgagcaggcggcggaggggctggagtgtcggcgtagcttgtccaatagcgcggcgactctgtggcacccggaagcgcattttgactgggttcggcctggcattattttgtatggcgctagcccgtccggtcagtggcgtgatatcgccaataccggattacgtccggtgatgacgctaagcagtgagattattggtgtccagacgctaaaagcgggcgagcgtgtgggctacggcggtcgctatactgcgcgcgatgaacagcgaatcggcattgtcgccgcagggtacgccgacggttatccgcgccacgcgcctaccggtacccctgttttagtggacggcgtgcgcaccatgacggtggggaccgtcagcatggatatgctagcggtcgatttaacgccttgcccgcaggcgggtattggtacgccggttgagctgtggggcaaggagatcaaaattgatgatgtcgccgccgctgccggaacggtgggctatgagttgatgtgcgcgctggcgctacgcgtcccggttgtgacggtgtaacttgttgtaagccggatcggaggcaacgtcttctgggtgcaaaaaaatcatccatccggctggtcagcaactgtagttgttaatgtgacagagccattgcccatgatagtgtccattaaaaggatggacactatttccccggaacctgaactcaccgcacaggcgttctacataaaacgcttacgcttcattgttgactcgaactcgacttcagataaatcacgctttacccttgatggagcctgtacatagatttgtgtaattgcctgattttgatatgttcaattcaacatcaaatgaaggttaaattatggacgacaaacaattgcaggctcaggctgcgttcagcaaagcatcgcaaccggcgatagatgcttcattaaatttaagattcagcttcctcttcagccacccgtacgccaatcttcaacacttcattatcttctttctcggccaccgtccagatcatcccggcaaactctacctggtcaccgacaaccggtgccgcgcctaacaactgctggacaatttcacccagcgtttgctgcttatcacgatattctcgcccgtcttccaggccatatatcagcgcaacatcagcatatttggcgctggcttcgagaatgaagtcaccaaagaagcgttgatccagcgcgaccggcgggctctggctgaacagtttaccgagcgccggaagatcgcgttcccgaccaattacacacaacacatcgccttcgcgcagtcgggtgctgccggtaggatgaagcaactggttatcacgaaacagtgccgcaatacgcgtctcttttggcatatgcaaatcgcgcagtgccgcgcccacgcaccatttatcggcactcaattgataaacaaactgctcccacggattttccggatgaatatccaggccaacgcgactcaccggacgtcccactggcggaaccaccactttggcttttttagccgcccagctgagacttgttccctgcaagagcagactaaccagaaccacaaagaaggcgacattaaagaacagacgtgcattctccagccccgccatcatcgggaacacggccaggatgattggcaccgcgccgcgtaatcctacccagctgataaacacgcgctcacgcagattgaaaccgcggaaggggagcaatccagcaaatacgctaaggggacgggcgaagaatatcatccatgcggacaaaatgagcgccggaatggcaataggcagcagatcgcttgggttaaccaacagccccagcaccaggaacatggcgatttgcgccagccaggcgaggccgtcgaaattttgcaggatgccgtagcggttgcgaatagggcgattacccagcagaaaaccgcacagatacaccgccagaataccgctaccttccagcgcagtagttaaactgaaaatcagaataccgccacttaatgccagcaatggatataatccggcgggcagggcgatgcggttgatcatttgcagtagtaaataaccgccgccaagacctattacaatgcccagaccaaattgttgcagaatatcgacaatgaacatccagctaatattgctctcatgatgctggatcatcgcaattagggtaatcgtcagaaagaccgccattggatcattactgccggattcaatttccagcgtgctgccaacacgttcgttaagccccttaccacccagcagagaaaagaccgctgcagcatcggtagagccgacgatagcgccgattaataagccttcaatcaaatcaagattaaacagccacgccgccatcatgccggttaaaccagaggtgataagcacgcccagcgtcgccaggctcagtgccggtcctaacgccacacgaaaggaactggcctgagtgcgcatcccgccgtcgagcaaaataatcgccagtgccaggttacttaccatgtaggcgaaggggtaattatcaaacgggataccgccgacgccatcgactcctgccagcatgccgatcgccagaaaaataaccagaataggaatgccaagacgggaagaaaaactactaagtaatatactgctggtgacaaggatggatcctaagatgaaaaggctaattattgttgtggcatccaacggtcggttactcctgattacgctgtctcttatataaaccctaccatattagcggcagagacagcgttttacttagccctgaagcgtgatttttttacattttaagaacaggatgaccgctaatcgtcaactgagtgccttcccgggtgttattcagaatggcatgtgcgcccaacggcagcgtaaccgtgcgttgttcatgaccaaaatcgaggccggtaatgagtggaatgctcaggcgggaacgcaaaaacgcgtacacactctccaggttgtaacctgcgtcataatcattgggcgtgctgccgctaaagctaccgagaataatcgccttctgacgtggcaaaattcccgcatgatagagctgcaacagcatacgttcgacccggaaagggtgctcgttaatatcttccagcaccagaataccgttctcaatttttggcatccacggtgtaccgatcagactaatcagcatcgcaagattgcctccccacaacgtgccttcggcccgacatgtcgggccttccccttgccattcaatggtgaaggtttcattgcgtaacgccagccagaaatggtgctcggtaaaggcgttcagttcatccgcgccaaagtttgctaccagcatggggccgctaaaggtgatgacattgccatgcgccagaagaccgcactgaatggcggtaaaatcgctatgtccgcaaatgagcaacgggtcatgttgttggcgagccaccagtgcctgccagtcaatatctgccagtaaacgactggcaccgtaaccgccgcgtacagccagcacgatggtgttgggggtagtcagtctggcaagggaattgagatcttccagacgctctgtttccgtacccgcaaaacgctcacaacgacgggcaataacctcgacgttattgacttgatgccccgcgtcggtaaggcgctggataccacgcagcgcggcgtgctgtttaatgcagtaaccgcttggggcaattaagtgaaacagagacatggcaattccttgctgacaacagaaacgaaatgtatatcatgccgcttaggtgtgccgttgtcacctcaacggcgattccaggctataaggatagaagaagtgaaattgagatggtttgcctttttgattgtgttattagcgggttgtagtagtaagcatgactatacgaacccgccgtggaacgcgaaagttccggtgcaacgtgcgatgcagtggatgccaataagccagaaagccggtgcagcctggggcgtcgatccacaattgatcacggcgattatcgctatcgaaagcggtggtaatccgaacgcggtgagtaaaagcaatgccattggtttgatgcagttaaaagctagtacctccggacgtgatgtttatcgccgtatgggctggagtggtgagccgacgaccagcgagctgaaaaatccagagcgtaatattagtatgggggcggcttacctgaatattctggaaaccggcccgctggcaggcattgaagatccgaaggtactgcaatatgcgctggtggtgagttacgctaacggggcaggtgcgctgctacggactttcagcagtgatcggaaaaaggcgatcagcaaaatcaacgatttggatgctgacgagttcctcgaacacgtagcgcgaaatcaccctgcgccgcaggctccgcgctatatctacaaacttgagcaggcactggacgcgatgtaaatcagtcgcgcactttgtccgctttttcccgggcttctcgctcgagagagaaaataatccgctgtaattgccgctccaccgtcgggctgacgttaagaaaacggaagctcagacggggagtggtgatggtttcattcttgccatcaatcactttgcgctcgctgatggagattaactgggcgtcaaagtgaaaaacaccccattgccccatgttgacttcaatctgagcgaagcgcatgccttcttgtaattcggcaggctttgctgtttccagtaatgcgcccatgccgcctaagctcaaatcatacaggcggaaacgtaacgtactgttatccgccagtttggtctggcaaaaataaggcggatggagtggggcggagatgcggaaatatcggcgtcgttgtacaaaccataaggtgggaggcggtacggtaataaatgccggaagctgcaagtattcactctgctgtagttgttcaacagtaaactcgactttcgcaccctgagtttcggcggtaatggtaatgtgctgtgcctttagcacggcgatgttgtcttcggcttgactgccgaaatccagcaccagtttatccggggttattgccagtaatttgctgatcagctgcccgccattccaactgagacgcaaaggaattgcggctttgtgcaaatcgcgtaacacgcccaggacggctaacggattttgtttcaggaactgctcatggtaatgactcacgcggaaaaactcctgactgacaaactgtctttggtttatcggtcacagttaacaaaacttaatacaaatgcgtgaatattttttacatgttgttcttaaatcagccgacatacgcccagcatcgatcccgcccttgcctatacttagagcgttgatgtaagcatttcttgcgtccgattcatcgaaacgagggcctgaacatgggaattattgcctggattatttttgacctgatagccggcattatcgccaagctaatcatgccggggcgtgatggtggtggatttttcctgacctgtattctcgggatagtcggtgcggtggtcggcggctggctggcgaccatgtttggcattggcggctccatcagtggttttaatctgcacagcttcctggtggcggtggtgggagctattctcgttctgggcatattccgcctcctgcgaagagaataagattttcataaggcggatagcgatacagatgccgctatccgctttcacatcagaacgtatactcgacacctgctttacgggtgaaaaaaatcaatatagcacttcgatatccgataaagtcggttcccggtaacaacaacagaatccttttttaattattgtttcgttgtttttggtgtgattcagaaaataaatattttagacagtagccagagtggcgttaaaaatggggcggatagtgaggcggttttggctgcgcttattgaacatttagaattgatcaatccttctggcagattaagccaaaatacccgtagcgcaatgcttcagttacgcgaagaggaatggtctgaattctttttttggttgctaaattctctggagtgtctggattatgtgattattaatttaactccagaaagcaaaaaaacgttgatgagtgaacaccgtaacaatattcaggtagcaattgatgctttatatagccaacgtcggcgtaaaagcccgggtgatgaaagtgaaacacttacccgtagaaatgacgctatcttcggcaaccacgtatggcaaacatttgcgcaatacttcccgccaggacttgaaaaaccgtctgtgtaaaaaaaaccatagctatggtgttatctgccgacaacgccatccggagaagccgaatgacgttgtcggagtaagcgctggttaaggtgtgggttgtgcctctttggtactgggttgcgtcgttgcactcttaacggtcggacgcgtcgccggaacattgtcacacggttgctctttcgggcagatcaaatccagcattttcagcgtcacgccattggtccagccaaagccatcctgtaatggatattcgccaccgccgccccccgttccggtggtgctgacatcatatttttccaccagctttttctcccggtcataggtgtgctgaacattggtcaggaagtgccagctaatgtccatcgccacctctttttgcccgtagttttgtaatccttctgtcgcgacccactgtaacggtgcccagccatttggcgcatcccattgttgcccacttttcacgctcgtggtgttcaggccgccgggttgcagcagatgtgttttcgtcgccgtcgccattttgttggcgcgatctttcgctgccgcattgacgtacagcgggaacagggcggccgcggttaactgattgcgcactttatgacttttcaggtcgtaatcggcataccagccttgttgatcgttccacaggtatttttcgatccctttttgacgggcatttgccagcgtttcgtactggtttgccatcgcgttatctccggcagctttgctggcgcgggcgaggattttttccattttaaacatcaggctgttcagatcgaccggtacgatgctggtggtgcgtaaggtatttaactgctgcgggttgtccatccagcggctgctgaaatcccagccagacgcagcggcagagcgcaggtcgcggtaaatttcagtggcaggtcgattcggattgcttttggcggtggcaatatcttccacccaactctctggtcgtggcgtatcgcgatcgtcccagtagcggttgagaagggtaccatcctgaagtttgacaacgcgtttttcctgttgtccggcttgcaggttttcaacaccgtccatccagtaagcatattctttttgcatttgcggcaggtattgcttcaacgcggcatcgccttcatgctgcgccagtaactctaccatcagggcaaagaagggcggttggctgcggcttaaatagtaactgcggttgccgttgggaatatgaccgtaagtgtctatttcatgagcaaaattggccaccatatccgcgactttatcccagtgaccgctttcggcaagtcctaacatggtgaagtaactgtcccagtaatatacctcgcgaaagcgtccgcccggcacgacataaggttccggcagcggtaacagagaatcccatttttcggtgttttcggtagaacgcgttaataccggccaaagtccgtcaatatgttcgcgcagactctgcccctctggcggaacatatttctcgccttctttcggcagggtgaaattgacgttaacgaaatggcgcagatcaaatccgctctggttttgctgcatccgataatcagcaaggatcatcagcggatcgctgttcggcacggcatcggcaaaggttttttggtccggaaaaagtttggcgttttgcacatcattaaacagcggccctaataaaatatcaggcggctgtggtgttaccggtgtttcttctgcctgcacgcttagcgcagcgaaacacaaaaagatacaggctggaattaacgccattttttgcgggcgagaaggtgcgggggatttcatcaatcattctcctttggcgaaaccgaataaaacggtattcaagtatcagaaaaccttagttcaggatcgcactagctgcatgatcgaaatctcattctgcgaactgtcaggcattttagaaaagggaattaaagggataaataacggcgaaatagagtgatcaaataacgtctgtttattagccagccagcggcgttgggttcgtgattagcgaagaaaaatcatcataaattggtgaaaaatataacaggtagttaaaaaccattagtgctgagtaaattgccggatgacatcagaacgatgccatccgaacagtggcttaaccctgacggttgaaacgttgcgttttaacgtccagcgttagcgtttcttctggttgtatcgcatacagtttctcaccctgctggcaaatccagccaatccccagttcacgggcgattagggcgctgtgggataccggacttccggcgctaaggcagataccttttacaaccgccggatccagttgcagtactgtggaaggataaatgttctccgccagtagaatagttgggctgttaaactgcgggagttcttctttcgtttgggtcaggtggaccagggtgcgatgcagaagatcgtccacatcaatatagcgagcttgtagatattcatcatccagttgctggtattgctggctaagttctttaagaacttgctgccaggcatattctgccgtgcaatgttcatgctgaaggagttcgcttgccgccgccagcagttccggatcatctaacagtgtatggtgaccagaaaagattgcggcaatatcgtcaagcccgctggcttctgctttcgctgttaacgtcatcagatctaataacgtgaagtcaatagcctggcgtaatcgatcttgttcttcttccacggtcagggtactttttgcctgtaccgtacataaaactggttgataataaaaggctttaccgctaacaggcggaacgggacgcagagtaggtggagcgacttcctccgtttcaccaaagttatcttcagccagctgacggaaagcgatcagtgcctcttcagcttctggccctttcgcaatcaggcgcagcgtatcgttatagcgaacttgtagtaacgcaatctggttaatactctctggtgtgacgcatttgccgtttttttccagcaacatatcggcattaaatgtgcttaaggtataaaccagccgggaggccggacgtacatgcaggccgttacggttttttatgaccaccgccagagaacgggcttcttcatcgtacgcaggacatgtgtcagagatttcagtgtcggaggacggtaaacccagttgttcacgtttggcttccagcgcatgcatggcgtcaaagataactttgtcgatatccgccccgctggccgcgctgaccgttgctgccagtgtaccttcgaccaacggcgcagcacacaaacgtacttttgcggcgatctcgggagccagcaattccagcgcagtttcagcactcaataatgcgctacccatatccatcatgaccagcacatggtcggcatcagcaacagattcgatggcctccatcactttgacggcatcggtaccaatgggattttgtggatcgtcaattcccgcggcaatggcgattttacaactatcactcattaacatctgacgggctaattcaccgacaccttctcccagtcggctgctatgactaactatgaccaggtttaccatcaccaattccttactcttttgcggctaacgccaacatttgcatcataaacatcacgctggtcgcgccgggatcctggtgaccaatactgcgttcaccgagataactggcgcggcctttgcgggcttgcatcgtaatcgtactttgtgcagcggattcggcgatgctactggcagcttcgagcgccaccggaacagagagattttgctcgctggactgacgtaagctttccaccaccggcacccacacatcacacatggttttatcgccaggttcggctttcccgcgactgattacgccgtccgcgccatcgcggaacatctgataaagctcttccagtgtcaggctttgccgtgcctgggtcgcctgtgcggcgcggataaagaaggtaccgaacagcggaccactggcaccaccgacgctggaaagcagcgtcataccggtattcttgagaatgaaaccgatatctttatctgcgatagcagggagtttttccaccactttgctaaagcctcggttcatatttagcccgtggtcagcatcgccaatttcgcgatccagtccggtaagatactcgctctcggtgctgaaaatatcgccacaacgagtgagccagttaacaatttgagttctgctcagactcattgctttctccttatttaccccagttaagggccggggtgtggaccggggcgtcccagagtgccagcgtttcgtcatcaactttcagtaaggtgatactgaaaccggtcatatccagactggtgcagtacgcgccaattaaattacgttcgatagtcaatcccgcttgctggcaacgtgtggtcaggcggttatagacgccgtacagctcagaaagcggagttgcgccaagattgttaaccagcgcaatcacccgatcgccagactggagcggttgtttggtttgttgttcttcctgccaactgccttgttgataatcccagaaacgcaaagtgcgatggtaactgccatttaccagcagggtgtcgaacatttcatcgacggtttgatcaagggaagagaaggggcggcggtcaatacccggctcaccatgaatgccgacgccaaactccatctcattatccgccagggtaaaagaaggtttgcccgcggcaggaacggtacaggcaccgagagcgatacctatactgtggccttgattattcagcttacgccccagttccgcacaggcgtccagactgtcgccacgctccgccgctgcgcctacgagtttttcaattaatacggtgttggcaacgccgcgtcgcccggcagtataaagactgtcttttaccgcaacgtcgtcatcaatgaccacagtggtcacttttacgccgctatcgtgcagtaactcggtcgctgtttcaaagttaagaatatcgccggtgtaatttttgataatcaacagtacaccttcgccgccatcaacttgcatggcgcattcaaagattttatcgggcgtcggactggtgaaaatttcgcccggacaggccccgctaagcatcccctgaccgatataaccacagtgcatcggctcgtgtccgctgccgccaccgctcagcagggcgacttttcctgcaacaggggcatcagctcgggtgacatacaccggatcctgatgcagtgtcaggcttggatgcgctttcgccagtcctgccagttgttcgtccagtacgtcttgcacatcattgatcaattttttcattattttgctccagcaattacggtagggcatggatgatgttcaacgacacggcgaccactgactgccgatgaatccattgtgcatcaggcaagggaaaagaaaattagcccaaattatgtttcatagtgaaacatatgctttaatgaatgttccatattgaaacttttacgtgtattaatacttaaaattgcgagccggaacaccttttgtcataagggatgcgggatatgagtggcgcttttaacaacgatggtcggggcatatctcccttaattgcaacctcctgggagcgatgcaataagctgatgaaacgggagacatggaacgtaccacatcaggcccagggcgtgacatttgcttctatttatcggcgtaagaaagcgatgctgacgctcgggcaggctgcgctggaagatgcctgggaatatatggcaccgcgagagtgtgcgctgtttatcctcgatgaaaccgcctgcattctcagccgtaatggcgatccgcaaaccttgcagcagctaagtgcactgggattcaatgacggcacgtattgcgccgagggaattattggtacttgtgcgctaagcttagcggctatctctggtcaggccgtgaaaacgatggccgatcaacatttcaaacaggtactctggaactgggccttttgtgcaacgccgttgtttgacagcaagggccgattgacgggaacaatagcgctggcgtgtccggttgagcaaactaccgcagctgatttgccgttgacgttggcaatcgcccgcgaggtcggaaatttactgctgacggacagtttgctcgctgaaactaaccgtcatttaaatcaacttaatgccctgttagaaagtatggatgatggcgtgattagctgggacgagcagggtaatttgcaatttattaatgcccaggcggcgcgggtcttgcgccttgacgcgacggcaagtcagggacgggcaatcactgaactcttaacgttacccgccgtattgcaacaagcaataaaacaggcacatccgctcaaacacgtagaagcaacctttgaaagccagcaccagtttattgatgcggtgataacccttaaaccgataatagaaacgcagggaaccagctttattttgttgctccatcctgtggaacagatgcggcagttgatgaccagtcaattaggaaaagtcagccataccttcgctcatatgccacaggacgatccgcaaacccgccgcttgattcattttggtcgccaggcggcgcgcagtagctttcctgtcctgctttgtggagaagagggcgtgggcaaggcactgctaagtcaggcaattcataatgaaagcgagcgtgctgcaggtccttatatcgccgtcaattgtgagttatatggtgatgctgcgctggcggaagaatttattggtggcgatcgcacggacaatgaaaatggccgtctgagtcggctggaactggcacacggcggcacgctgtttcttgaaaagattgaatatctggcggtggagttacagtctgctttgcttcaggttatcaagcagggggttatcacgcgactggatgcgcggcgtttaataccaattgatgtcaaagtgattgcaacaacgaccgcggacctcgcaatgctggtggaacaaaatcgttttagtcgccagctgtattacgcgctgcatgcatttgaaattaccatcccgcctctgcgtatgcggcgtggcagcattccggcgctggtgaataacaaattacgcagtcttgaaaaacgcttctctacgcggctgaaaattgatgacgatgccctcgctcgcctggtttcttgtgcatggccaggcaacgattttgaactttacagcgtcatcgagaatcttgctctgagtagtgataacgggcgcattcgcgtcagtgatttgccggaacatctgtttaccgagcaggcgacagatgatgtcagcgccacccgcctttccaccagtctgagttttgcggaagttgaaaaagaggcaattattaacgcagcccaggtcacaggcggtcgcattcaggaaatgagcgctttacttgggatcggccgcactacgctgtggcggaaaatgaagcaacatggcattgatgcagggcagtttaagcgccgggtatgaaagacagaaacgatttctgatacatcagagtgatctgtatttcattccggcgcacgctaacaattttcagcatcgtttaagggcttgtctatcccgcacttaaaagctgaagcgatatcctccgttgacttgcttctgatcaaagaggttaccctgcgtgtaatccgcttcgagatagaatgtgtgctgtttgttatactgtgcactgactcccacgccgttattccagccattacctttgaaactgtacttctcccgggagttgttcaacagatattcggtatccccactaaactcgcggatagcgccagtcttcacatagacattcagctggctgttgcctgcggtgatgtcataccccagtatcatgctggcacgccccagcaggctttcgtagtgattcagatgtatattgaggccattactcgccttcatagtcatctcattctggtggctgtatgtaagctgggtttgcggctctatatagaacccataaccagtaggggacaggttgaacctctgcccggcttccagggagatgctcattccattcgcagtgccgttggcgttaacgccgttgttctgactgtccagtacgtggaaactatttttctggcggcttgcttttataacgagatcgctgtaaaaaccgttttgtgccatgtaactggcgtacattcccatgtagtcactacgtgcggtaccgtcgcctccgctatagtccgggcttgcatgtgtactgccaatatacagaccgacatacaacggcattacatcagagagacgtttatccccaccaaactggataccgctgtaacccatgtcaaagccgctcagtttgccactggcaaaggagtccaggcttcccccataactgcgcaaccagatattaccgtctttactctgatttcgcaggtcacccatccgttgcatcagcgtacggttttcaacatagttcaataagtaaccgacattgagataattgccgccagcatctgcggtcgtggtgggtttaggcgtgggagcgggttcaggcgtaggatcggggttgactatgggaggctgagcgggagctggtgtgggttcaggattaggagtcggttccggaactgtcccggaagcgtaaagctcccagttagtgccatttttacgcacatcgtacagatatccccccaactcaacctgagaagacgcgctgaagctggccgcgccgtcagtggtttttaccactgtcagaacttcatttcccgttgtggcctcgctgccctggttgcggatagccaatacgtgattaccagcactactcccgctgatattcaataaatcccctttattattaacgccattaccctcgccaacaacatcagcacgcataataaaggtactgttaccgctcaggttctctacgtttaatgtggcaaatgtgccggcagtactcccgtggctggcaaaatcgacagtactatggctcagcgccagcgtgtcgagattagaattacttgttacgttccagacgctgttattcattgcaacgtccagttttccgccattgacattatcgctgagggaggaacctgtccaaacgttcccagggtgcatatccagattgattagcccacctttggaaagaacgctaccgttgataagcatacgaccgctggcgttgatgcggctggcggcataaccatcgtcatgttgcgttgcgatggccatctggtcgggtgtactcatatcaatgaccagatcgctcgtgaggtcgatctggctgttggtcatggcataaattcccctggctcctgccgcgccggtgatagccaaactgtctccggttattctaccgccgctgagagcccacaaacccagcgccagactgccattacgatcaactgtaatatcggtattttgcatgttgacaacagccgttgccgtctgggcgctggcaccataagaaccgccggaaaagatgctgtttcgttgcgctgccgtgccagtaaaattgattatcgcgtcactaccactggtgacgaggccaccgccctgcgcggaagaaatatggctatctgcaccgatagtggttgtaccaccacgaacttcgacgccattggccgcggctccagttacatcaacagtgagtgcattcgcgctaacctggccaaagctccagaggccgtgagcattatcgccattggttttaatggtactgtttgttccgagatcgacaacagagtttttctgtacgtttatccccatggcgctgtagccctgaacatcgattgtcaggtctgtagccgtaaaacgcgcagcaccattggcgttattgccgttgagaccaccgatataaacacctgtacttccatcggtcgtgattttacttccgcttccaagatcgacactggtgccatagtcattgatggttaggcctataccgttgctgttttcaatggtgaattgagtggctgttagtgtactgctatgcccaataatgatgccgtcatcgttactcttaatggtgctgcctgtgcctaagtcagcatgggtatagtcaccaattaagttaatgccgatggcagaggtttgaccaacaacatctactgtgagtcggttagctgtcagggagctgtttttgccctgaataatgattccttttgcatatccagaggcgtcgttgacattgacggtgacatcattacccaggttgatattgccaggcgtgtttcctgctggggtcattacaccatagaggtttccacttggatcggcggtatctcctgtaattctgtcaccatcattaatagtaatattggtgccatattgacttcctgtatcagcagctatcagcaggggggaaaagataattgcattcaaaccaatagcgccaaattttatcagttgaatactggggctacggatttttaattcagcgagacgatctgctttggtattcccattgtgttgtttgatgcccataccactcctatatagtacccagactatgggtctatggattttgtcattttgtttaaatcaatgaataatatcctcttatcatcatgatatttgtatggtgcaatcatgatgagcttctcagagaataattctctattaccgggcaaaatcaggaacacaggaattaatatatatttaacatcccccttacaaaggtgagtttatatcgagttattccctaagttgtcgttacttattccaattcgttactataaatatggcaaaaatattacaacaaacagcggttaaaaaatttggtgaagattttttgtaataatcctaattagttatgggaatttcgcttgatgtatctgcataacaaaaacaatatgcgccatttttgcattactaataagaaaaagcaaaaaacatcgatattcatttttggtcaatgggttttctggcctatcgttgttattgtgctactggttatcattttcatcttgccagcatattggagcgtgatcaattttgatcagctgtgaagggggctgatgtgtagtgatacaaaaacttacgttatatcactgctaatgagatatccggcatctgaacacttatgtctttaattattctcgtggttcactataggcaataagcacaaaagtgtaggatgttacaagaatgattaggactcggtgaaatgaaaaatccacgcaattgcgtggattttatatacttttgcgctcttcatgagatttagcgaaacctcatgagacaataaattaattagacgttgaaaaggaagttcatcacatcgccatctttcacgatgtaatctttaccttctgcacgcattttgcctgcttctttcgcgccttgttcacctttgtaagtgatgaaatcttcaaagctgatggtttgtgcacggataaagcctttttcaaaatcagtatggattttgcccgctgcctgcggcgcggttgctccaaccggaatggtccatgcacgcacttctttcaccccagcggtgaagtaagtttgcaggttcagcagtttataaccggcacggatcacacggttcaggcccggctcttccagcccaagctcctgcataaactcgtcacgttcttcgtcgtccagttcggcaatgtctgcttcaacagcagcacaaaccggaaccacaacagaaccttctttcgccgcgatttcacgcacctggtcaagatatgggttgttttcaaaaccgtcttcgttgacgttggcgatgtacattgttggtttcagcgtcaggaagctcaggtaacgaatagccgctttctcttcagcgcttaaatccagcgcgcgcagcatacctgcattttccaactggggcaggcatttttccaggaccgccagctcagctttcgcgtctttatcgccacctttggctttcttctgtacgcgatgaatcgcacgttcgcaggtgtcgaggtctgccagcgccagttcggtgttgataacttcaatatcgtcagccgggttaactttgccggaaacgtgaatgatgttgtcattttcaaagcagcgaacaacgtgaccgatcgcttcggtttcacggatgttggtcaggaactggttacccagaccttcgcctttgcttgcgccttttaccagaccggcgatatcgacaaattccatggtcgtgggaagcgtacgctgcggttttacgatttcagccagttgatccaggcgaggatcaggcattggtacgacgcctgtgttcggctcaatggtgcagaatggaaagttggccgcttcaataccggctttggtcagcgcgttgaacagggtagatttcccgacgttgggcaaaccgacgataccgcatttgaatcccatgatttaaatcaccttaatatcttaataatcaacctgttattgctaacagattgcagaaatggaaataactttgcctattatacacggcactcggcaaaaatgccgcagacaacgacttattgcgctttaaaggcgtgcaatcggttcgttgctttggtcaagccatctgtaaaccacatttcagtacaacgcgccgcttcgtcaatggcttcatcaattaacttctgttcactaacaggcggtttgcctaacacaaaaccgacaactttatttttatcgcccggatgaccgattccgatgcgtaaacggtgaaagttagggttattacccaatttactgatgatgtctttcagtccattgtgaccaccatggccaccgcccaatttaaatttggcgacgccaggaggcagatccagttcgtcgtgggccaccagaatttcgtccggattaatgcggaaaaaactggccatcgccgcaacggctttgccgctgagattcataaatgtagtcgggactaacaggcggacatcttcgcctccaagagtgactcggctagtataaccaaagaatttagcctcttcgcgcagcggagcgcgcaaacgctctgccagtaagtcaacgaaccaggtaccagcattatgtcgcgttgcggcgtattcagcaccggggttcgccaggccgacaatcaatttaatcgtcacgtttttttgtcctgagtgtgtacataactggcgcgtagtttactggttgcggccccgcttgacaaaaaactgcgtatcaaatgcagataacgtaataattgcctgagtggactattagaaagtcaaggtgttcaggcgtttatttgtaaagttttgttgaaataagggttgtaattgtgatcacgcccgcacataacccactgggtgttgtctatactttacacataaggaagaggggtattccctgttacaacccagaaagttccggaggtgacatatgaaacgcaaaaacgctagcttactcggtaacgtgctcatggggttgggtctggtggtaatggtggtcggcgtggggtatagtatcctcaaccagttaccacagtttaatatgccccagtatttcgcacatggtgcagtgctaagtattttcgtcggtgccattctctggctggcgggtgcccgtgttggcgggcatgaacaggtgtgcgaccgttactggtgggttcgccactatgacaaacgttgccgccgtagcgataatcgccgtcatagctaacaaataatgcagtttgctgaccagtcagtttgcgctgactggtcaatctcgtacttataaatccgccatcgccgcgcgacgattcgggaagaacgccaggcgtcccgggatcggttgaatgccagcgcgagccatagtgcgcagtggctggaattccacgttgcacacgcgcagttcacatccctcgggcagacgcttcacaaaacgctggaacgcatcaagaccaccagcatcaagtaccggaacggcatcccacttcagaatcacaatccgtttgccttcaagacgactctccaggtccgtgaataagccttcagcagcagcaaaaaacagcgggccaataacgcgcagaaccaggacatcgtctggaacatctacgactaccggtgccaggcgagtcatacgtgcgatacgacgcataaacagcaggcttgccagcacgatccccacgctgatggcaataaccatatcaaacaacacggtcaggctcatgcacagcagcatgacgatgatgtcatctttcggcgcatgacgcagcaagtcgaccactttgtgcgcttcactcatgttccacgccaccatcaacagcagggctgccatggcggaaagcggcagccaggagagcagcggtgccagtaccagcagggcaagaataaccagaatagagtggatcaccgcgctgataggggacgttgccccggcacggacgttagcggcagaacgcgcgatggcagctgtagcggtaataccaccaaagaacggagcgataatattccccagtccctgtccaaccagttcgctgttcgccttgtgtttcgtcccggtcataccatccagcaccacggcgcagagcagagattcgattgcgccgagcattgccatactgaatgccgcaggcagcagtgtgcgaatagaatcccaggttagcgtgaattcactattaggcagatcccacggcagcaccagttgcggcagcagttgcggaataccgttaccctgagaaccatcggccaggacgtagtggaattggctaccgatggtagcaacatgtccgccgagcaggttaacaatccccatcaccgcgcaaccagccagcaaggccggaaggtgaccgggtaaacgaatgcccagacgcggccaaaaaacaagaatacctagcgtcacaatgccaatggcagcatcacccacattaatggtcggcagcgccataaataatgcgccgactttttgtagataatgttccgggacatgggccatttgcagaccgagaaaatctttaatctgcatggtaccgatggtgatcccgataccgctggtgaaacctaaggtgacggaaaccggaatatactcaatcaggcgaccaaagcgtgccagacccatcagaatcaaaaagatcccgctcagcaaggtcgcaaccagcagtcctgccagtccaaactgttggctcacgggatagagaattaccacaaatgccgcagtcggaccggaaacgctaaagcgactcccacccgtcagagcaatgacaatccccgcaacagctgcggtatataaaccgtactggggtgccacaccactaccaatagccaacgccatcgccagcgggatagcaataatcccgacggttatcccggcaatcaggtcacgggtaaaccgtgcggcagtatatttttctttccagcaagcgtcgatcagagcgcggaaaggcatcacatgactggaaaatattttgttcacaataatgtttcatccgtgagcgcatcatctgtcaactaaatggcaggtgaaggaggcataggtcatacaaatggatattacagacaaaaaaacccgccgcagcgggtctttgagccgggttcgattagtgttcgaacatggcagagatgctttcttcgttgctgatacgacgaatcgcttcggccagcataccactcagggtcagagtacgcacgttcggcagacttttgatttcatcgctcagcggaatggtatcgcagacaacgacttcatcaattacagagttacgcaggttgttcgccgcgttgccagagaagatcgggtgagtcgcgtacgcaaatacacgtttagcaccacgttctttcagagcttcagcagctttacacagcgtaccgccagtgtcgatcatatcatcgaccagtacgcagtcacgacctgcaacgtcaccgatgatatgcatcacctgactaacgttcgcacgcggacgacgtttgtcgatgattgccatatcggtatcgttcagcagcttagcgatagcgcgggcacgcacaacgccgccgatgtccggagaaaccacaattgggttatccagattcagctgcagcatgtcttccagcaggatcgggctaccaaatacgttatcaaccggaacgtcgaagaaaccctgaatctgttcagcgtgcagatccactgtcagcacacggtcaacaccgacgctggagaggaagtctgcaaccactttcgcagtgattggtacacgagcggaacggacgcgacggtcctggcgcgcatagccaaagtaggggataacagcggtgatacgacctgcggaagcacgacgcagggcatcaaccataacgactaattccatcaggttgtcgttagtaggggcacaagtggactggatgatgaaaatatcaccaccgcgtacattttcattaatttgtacgctgacttcgccatcgctaaagcgacctacagcggcgtcgccgagactagtgtacaggcggttggcaatacgttgtgctagttccggggtggcgttaccagcaaaaagcttcatatcaggcacgagaagaacctcaggcatgcgtccattggtggaaagaatctgccgaaaactgtgcgggccaggcatgatcctttccaggcggtgtattaaagagcgcgatgcaacgtctggaacaaggtgacgttgtcaccgaaactcagcttgcccggcttaaagcatggctctgtgcaatggggaaagattagcgcctttcgccacaaagccattgagccattccggggcttgctctagcacctggcgggcttcagactctgtatcaaattcagcaaagacacaggcccctgtcccagtcaggcggctcggggcgtattctaacagccaggaaagcaccgcatcaacctcgcgaaaacgttttcttgcgataacctcgcaatcattgctgaattcacattttagcaacgtttctatactcctttttggcgtattgcgcgggagttcaggatctttaaaaatcaccggagtcggaatacttacaccagggtgcgccaccagataccacttctctggcggatccaccggcgttagtatttcaccaacgccttcggcaaacgcggcatgcccccgaacaaagacaggaacatctgcgcccagcgtcagccccatttccgccagctcatccatgcttagcccgcattgccagagatgatttaatgccaccaggaccgtcgcggcattggaactaccaccgccgagaccgccgcccatcggcaaacgcttgtcaatgctgatattcgcaccgcttcccgtcggaagacgcccgctgtctgccgcagttttcatcaacaatcgcgctgcgcgaacgatcaggttatcttcatgttccacgccttcaacgggcgttaacagacgaatatccccatcgtcacgaagctcaatgctgatggtgtcgccgtaatcaagaaactgaaacagcgtttgcagcgtgtggtaaccatccgcacgctgaccggtaatgtataaaaacagattaagttttgccggagagggccactgtgtccgcattatttcactatccagttatccatttttaacttgatgcgttgaccaccgtcggtgagttccatattggctggcatcgcaggttgcgttttggtgtcataaccaccataaacaaccttccagtttttgccattctggctgtaggtaatttcgctcaggcggtactggtcgtccagtttgtagtcggttgcatcacccggtaaacctaaaatccactggcgcaagctgttgagcggaattggcattccggtcaatttgccaatcatctcttcggcgtcatcggcggtataacgctgacctttattgtcgactaactgcacgttacccggttgagcattcagctccagttccgtgctgcccaatgggttagtgagcagcagacggtagcgatcctggccggtttgctgccagaaaaagcgggcgtacactttttgttggtcagaaatataagcgaacgcgccgcgagtctgatactgattaagattgcgcacgtcttgctgatgctgacgccattgtgggctatccgggcttttgccaggacctttgggcgtggtaacggaacaggcagtgagcacaagagcagccagcggtagcaggcggataagacgaaaatcgggcaggggcatagtgatgacaagtccttgagatacgttgcagttataacccttaatgctagcgttaccgtccgctatcgtctatgttcaagttgtcttaattgccagaatctaacggctttcggcaattactccaaaagggggcgctctcttttattgatcttacgcatcctgtatgatgcaagcagactaaccctatcaacgttggtattatttcccgcagacatgacccttttagcactcggtatcaaccataaaacggcacctgtaagcctgcgagaacgtgtaagctttagcccggataagctcgatcaggcgcttgacagcctgcttgcgcagccgatggtgcagggcggcgtggtgctgagcacgtgcaaccgcacggaactttatcttagcgttgaagagcaggacaacctgcaagaggcgttaatccgctggctttgcgattatcacaatcttaatgaagaagatctgcgtaaaagcctctactggcatcaggataacgacgcggttagccatttaatgcgtgttgccagcggcctggatagtctggttctgggggagccgcagatcctcggtcaggttaaaaaagcgtttgccgatagccaaaaaggtcatatgaaggccagcgaactggaacgcatgttccagaaatctttctctgtcgcgaaacgcgttcgcactgaaacagatatcggtgccagcgctgtgtctgtcgcttttgcggcttgtacgctggcgcggcagatctttgaaagcctctctacggtcacagtgttgctggtaggcgcgggcgaaactatcgagctggtggcgcgtcatctgcgcgaacacaaagtacagaagatgattatcgccaaccgcactcgcgaacgtgcccaaattctggcagatgaagtcggcgcggaagtgattgccctgagtgatatcgacgaacgtctgcgcgaagccgatatcatcatcagttccaccgccagcccgttaccgattatcgggaaaggcatggtggagcgcgcattaaaaagccgtcgcaaccaaccaatgctgttggtggatattgccgttccgcgcgatgttgagccggaagttggcaaactggcgaatgcttatctttatagcgttgatgatctgcaaagcatcattagccacaacctggcgcagcgtaaagccgcagcggttgaggcggaaactattgtcgctcaggaaaccagcgaatttatggcgtggctgcgagcacaaagcgccagcgaaaccattcgcgagtatcgcagccaggcagagcaagttcgcgatgagttaaccgccaaagcgttagcggcccttgagcagggcggcgacgcgcaagccattatgcaggatctggcatggaaactgactaaccgcttgatccatgcgccaacgaaaagtcttcaacaggccgcccgtgacggggataacgaacgcctgaatattctgcgcgacagcctcgggctggagtaacagtacatcattttctttttttacagggtggaggaggaataatggaatatcaacactggttacgtgaagcaataagccaacttcaggcgagcgaaagcccgcggcgtgatgctgaaatcctgctggagcatgttaccggcagagggcgtacttttattctcgcctttggtgaaacgcagctgactgacgaacaatgtcagcaacttgatgcgctactgacacgtcgtcgcgatggtgaacccattgctcatttaaccggggtgcgagaattctggagcttgccgttatttgttagcccagcgaccttaattccgcgcccggatacggagtgtctggtggagcaggcactggcgcggttgcctgaacaaccttgccgtattctcgatctcgggacgggtaccggggcgattgcgcttgcgctggctagcgagcgcccggactgcgaaattatcgctgtagatcgtatgcctgatgctgtctccctggcacaacgtaatgcccagcatctggcgatcaaaaatatccacattctgcaaagcgactggtttagcgcgctagccgggcagcagtttgcgatgattgtcagcaatccgccgtatattgacgagcaggaccctcatcttcaacaaggcgatgtccgctttgagccgctcactgcgctggttgcggcagacagtggaatggcagacatcgtgcatatcatcgaacagagccgtaacgcgctggtatccggcggctttctgcttctggaacatggctggcagcagggcgaagcggtgcgacaagcatttatcctcgcggggtatcatgacgtcgaaacctgccgtgactatggtgataacgagcgcgtaacgctcggccgctattatcaatgacaagtttttctacactgcttagtgctcatcttattagtatcgcgctttctgttgggctattaaccttacgtttctggctacgttatcagaagcatccacaggcatttgctcgctggacgcgcattgtgccgccggttgtcgatacgctgttactgttaagcggcattgcgttgatggctaaagcgcacatcctgccattttccgggcaggcacagtggctgactgaaaagctgtttggagttatcatttatatcgttttgggttttattgcactcgattatcgtcgtatgcacagtcagcaggcgcgcattattgccttcccgctggcgttggtggtgctgtacatcatcattaaactcgccaccacaaaagtaccgttactggggtaagtcatgagaagcttagctgatttcgaatttaataaagcgccattgtgcgaaggcatgatcctggcttgcgaagcaatccgccgcgattttcccagccaagatgtttacgacgaactggagcgtctcgttagtctggcgaaggaagaaatcagccagcttctgcctttagaagagcagttggaaaaactgatcgcgctgttttacggcgactggggatttaaagccagtcgcggtgtttatcgtctttccgatgcattatggctggaccaggtgttaaagaatcgacagggcagtgcggtaagtttaggtgcggttttattatgggtcgcgaatcgtctcgatttgccgctgctgccggtgattttccctacgcagctgatattgcgcattgaatgtccggatggcgaaatttggctgattaatccttttaacggtgaaagcttaagcgaacatatgctggacgtatggttaaagggaaatatcagcccgagcgcggaactgttttatgaagaccttgatgaagctgataacattgaggtaatccgcaaattgctggatacactcaaagccagcttgatggaagaaaatcagatggagctggcgttacgcaccagcgaagctttattacaattcaaccctgaagatccctatgaaattcgcgatcgcgggttgatttatgcgcaactggattgcgaacacgttgcgttgaacgatttaagttatttcgttgaacagtgtccggaagacccgatcagcgaaatgatccgtgcgcaaataaataacatcgcgcataaacatattgtgctgcattaattaatcgacattttactcaagattaaggcgatcctatgaaacaaaaagtggttagcattggcgacatcaacgtagcaaatgacctgccgttcgtactgtttggcggtatgaacgtgttggaatctcgcgatctggcgatgcgcatttgcgagcactacgtaactgtgacccagaaactgggtatcccttacgtgttcaaagcctcttttgacaaagccaaccgctcctccatccactcttatcgtggaccgggcctggaagaagggatgaaaatcttccaggagttgaagcagacttttggcgtgaaaattatcaccgacgttcacgaaccaagtcaggcacagcccgttgctgatgtcgtggatgtgattcagttgccggcgtttcttgctcgccagactgacctggttgaagccatggcgaaaaccggtgcggtaattaacgtcaagaaaccacagtttgtcagcccgggacagatgggtaatatcgttgataaattcaaagaaggcggcaacgaaaaagtgattctttgcgatcgcggtgctaacttcggctatgacaacctggttgtcgatatgctgggcttcagcattatgaagaaagtgtctggtaacagcccggtgattttcgacgtgacccacgcactgcaatgccgcgatccgtttggcgcagcttccggtggtcgtcgtgctcaggtggctgagctggcacgagccggtatggcggtaggtctggcggggctgtttattgaagcgcatccggatccggaacatgcgaaatgtgatggtccatccgcgctgccgctggctaaactggaaccgttcctcaagcagatgaaagcgattgatgatctggtgaaaggtttcgaagaactggataccagcaagtaatcttttttgcttgaaaaataaagtattagcgttctgcgttaagacttttttcatgggtgccggatacaaaaaaggccgcaggctgttacccctgcggccggtttcgggcgcatattgccatcacggcagcctgacgcccgttttcaccttacttccggttacgccaccagctgacaatcgctgcggtaataattcccgccaggatcggtgctgccaggtcgtgccagaaaatcatggcaaactgcgcgagcgtcatatagccgccttgttgtaatgacaacattttgcggctattcttgaattgttctggttcaagattagcccccgttctgttgtcaggttgtacctctcaacgtgcgggggttttctctttccagcaaccaatgccaccagggataaagcccccgcaacattgcgcctcaccggataacgccggcttggtgtggatactacgactcaattcatcttcacttcatccctgaaatgtttgcaatgaagagtgcattccggtttttcaacagctgttacagtcatttcatgagtgctctggatgaggcttccagctcgggttgccaatatttacttgtggaagtgataaagacaaaaatggccgcaggctgttacccctgcggccggtttcgggcgcatattgccatcacggcagcctgacgcccgttttcaccttacttccggttacgccaccagccgacaatcgctgcggtaataattcccgccaggatcggtgccgccaggtcgtgccagaaagtcatggcaaactgcgcgagcgtcatatagccgccttgttgtaatgacaacattttgcggctattcttgaagtgtctggtttcaagattagcccccgttctgttgtcaggttttacctctcaacgtgcgggggttttctctttccagcaaccaatgccaccagggataaagcccccgcaacattgcgcctcaccggataattccggcttggtgtggatactacgtctcaattcatcttcacttcatccctgaaatgtttgcaataaagagtacattccggcttttcaacagctgttgcagtcgtttcatgagtgctctggatgatgcttccagctcgggttgccaatatttacttgtggaagagataaagacaaaaatggccgcaggctgttacccctgcggccggtttcgggcgcatattgccatcacggcagcctgacgcccgttttcaccttacttccggttacgccaccagctgacaatcgctgcggtaataattcccgccaggatcggtgctgccaggtcgtgccagaaaatcatggcaaactgcgcgagcgtcatatagccgccttgttgtaatgacaacattttgcggctattcttgaagtgtctggtttcaagattagcccccgttttgttgtcaggttttacctctcaacgtgcgggggttttctctttccagcaaccaatgccaccagggataaagccccgcaacattgcgcctcaccggataacgccggcttggtgtggatactacgtcgcaattcatcttcacttcatccctgaaatgtttgcaatgaagagtacattccggcttttcaacagctgttgcagtggtttcgtgcagggtgtggtacaggctcgcaattctgattaacgacctgtccaggtagtatgaagaaatacaataagcaggaatttatattatctcccccgattaccgtcatcggaggagatataactgtcaggcaaatatcgtcatcaaataggcggcaaacagtgccagatgcgctgcgccattgagcatgttagtacgtccggtggagaaggagatatggcacagcactaaagaggccaccatcaccaccatttctggcgcaccaagtgcaaactgcaattcgttacccgtcataaaggcaattagcgtgacgacaggtacggtaaggctaatggttgctaacacactaccaaagaacagattcatcgcgcgctgaacctggttgttcaacactgcttttaatgcacctaaaccttccgggctcagaatcaacagtgccaccaggaagccagtaaaggcgacaggggcattcatgctgtcgagcaatgtctccaggctgctggcgttcattttggtcaccgcaataacggcaatcagatggataatcaaccagatagcatgccacaggctgctatgggcagacggtttaccgtgatgcgggtcgtcatcatcactgtcatcttcgtgctcgtagacaaacaaactttgatgcgttttggtctggatcagcaaaaatacgccatacattgccgcagaaattaatgctaccagtaacgcctgaccggtactaaaattcgccgcaggcagagccattggaaataccagtacgattatcgccagggggaacagcgcaattaaatactgcttgataccaaacagattcatatattgggtggcaaacttacgaccgcccaacaataaactaaagccaaccagcccaccggtaacaatcataatgatactatagagcgtatcacgcattagcgttggcgcggcgtcgccggttgccattaaagcactaatcaaactgacttcaagaataaccacactaaggctaagaataaggctaccgtaaggttctcccaggcgatgggctaatacgtccgcatgacggacaacactaaaggcgctacttaaaataccaataagcgcaagaagattgatggcaatgaccactggtagtgtctggctgcttccccacaggaacagcactaccagcgccagaaccgggaaaataaggctagtctccttgtggcgggtttttaccgcctcttgagcattactcattatggttatccctttgcagatgaatttatcgaaaatgtaaaaaataggtaggaaaaataacagaaagtgtctggatatcggtaacattttacgaatttttaccccgctgtcgattttttactcattggggcataaaaataagtattacgtttagacaatgtttgttttagcgtctcttaagaagagtctgacctgaaaattcttatgttttggcaagagtagatattgttgaccacacttaatgttcaactttgtaaaaggagtcaacgatgccgtataaaacgaaaagcgatctgccggaaagcgtaaagcacgttctaccgtctcatgcccaggatatctataaagaagcgttcaacagcgcatgggatcaatataaagataaagaagatcggcgtgatgacgccagtcgcgaagaaaccgcgcataaagtggcctgggctgctgtgaagcatgaatatgccaaaggggatgatgataaatggcataaaaaaagctaaaaccggtcgcttagttaaagctattcgtgcggtgttgccttgcaagtggtccgtggattgcatattgtcccgttagtggtttcaaaatgagcagtaaaaatgtccggaagacaccaaaaagttgtcgcagggaagtatgcagtggcggaagtgtaaggtgataacgcgtgatttcttgatgaatgccgattgtaaaacggcatttggtgccattgaagaaagtctcttatggagtgcagaacaacgggcggctagcctggcggcgacgctggcttgtcgacctgatgagggaccggtgtggatcttcggctatggaagcttgatgtggaatccggcactggagtttaccgaaagctgcaccggtacactggttggatggcatcgcgcattttgcctgcgcctgaccgccgggcgcgggactgcgcaccagccgggacggatgcttgcactgaaagagggcggacgcaccacaggcgtcgcctatcgactgccagaagagacgctggagcaggaactaaccctgttgtggaagcgagagatgattaccggctgttatctgccaacctggtgtcagcttgatcttgatgatggacgcacagtaaacgccattgtgtttattatggacccgcgacatccagaatatgaatctgatactcgcgctcaggtcatcgcgccgttgattgcggcggcgagcggtccgctgggaaccaacgcacaatacctgtttagtctggaacaggagcttatcaaactgggaatgcaggacgatgggctgaatgatttgctggtaagcgtaaaaaaactgctggcggagaattttccggatggtgtgttacgtccgggattcgcctgagtaaacttcccgcatagtggggcgtcagacgccccctcaaacattaaaatgtgagcactttatcggcactcagcgtccattgcgccagttccacaagagtaccgatttccaccccatcaatcagaggaagtgtactaatcccgcgcccgtcggtacaggttttgcacaatttcaccggtacattctgagcggtaaggatctccagcatttgctgaatgttgtagccttcccctggtttttgcccgcgcaacccggctgtgaccgcatcagacatgaggaacagacgcagatccagattgctctcctgctctcgtaacgcaatggccagccgcaagctgttaaacaaggattcgctcccgtaaggtgcgccattggcaacgatcacgattttttgcattatttactcctgtattcagggaattagacactcatcttctatcttactgcttctgcagcgtctgaccaatcggtcacatttttaaggattttcctgaaagcgcgagaaaatacgacaaaagttgccagtaatcgttattctttaaggctatggtttttcattattaccggaagttaccgacgttttgagccgtttcgttcctcgcattatcccgttttatttactcttgcttgtagcaggcggtacagctaacgcacaatctaccttcgagcaaaaagcggcaaatccctttgataataacaatgatggtctgccggatttaggcatggctcccgaaaatcatgatggggaaaaacactttgctgaaattgtgaaagatttcggcgaaaccagtatgaatgataacgggctggatactggcgagcaggcaaaagctttcgcattgggaaaagtccgcgacgcgcttagtcaacaggttaatcagcacgtagagtcctggctaagtccgtggggaaatgccagtgttgacgtcaaagtggataacgaaggacatttcaccggcagtcgtggaagctggtttgtgccgttacaagataatgatcgttatctcacctggagccagcttggtcttactcagcaggataatgggttggtgagcaatgtgggcgttgggcaacgctgggcgcgcggcaactggctggtgggttataacactttttatgacaacttgctggacgaaaatcttcagcgagcgggctttggtgccgaagcgtggggcgaatatttgcgattaagcacaaacttttatcagccgtttgctgcatggcatgaacagacagccacgcaggaacaacggatggcgcgcgggtacgacctgacagctcggatgcgcatgccgttctatcaacacctcaataccagtgtcagcctagaacagtattttggtgatcgtgttgatttgtttaactctggtacgggttatcacaatcccgtcgcgttgagtctgggattaaattacacccctgtgccattagtcactgtgacggcccagcataaacagggtgaaagtggcgaaaatcaaaataacctcgggctgaatcttaattaccgctttggtgtaccgctcaaaaaacaactttctgcgggcgaggttgccgaaagtcagagcttacgtggtagtcgctatgacaatccgcagcgaaataatctaccgactcttgagtaccgacagcgaaaaacgttaacggtgtttctggcgacaccgccgtgggatctaaaacctggcgaaacagtgccgctgaaattacaaatccgcagtcgttacggtattcggcaactgatttggcagggcgatacgcagatattaagtttgacgccgggcgcacaagccaacagcgcggagggctggacgctgatcatgcctgactggcagaacggggaaggggcaagcaatcactggcgattgtctgtggtggtggaagataaccaggggcagcgtgtctcctccaatgagatcacgctaacgcttgtcgaaccgttcgatgcattgagtaacgacgaactgcgctgggaaccgtaatcagaaaatgcgctcctgatgcacccataccgctgcttccacgcgagacttgagcttcattttcttcagcatgtgcttgacgtgcacttttactgtgctttcggtgatatccaggcggcgggcaatcatcttgttcggcaaaccctgggcaatcagcttgagaatatcgcgctcgcgtggggttaactggttaacatcgcgctcagtagtggcacggttagcgcgcaagctggcggccagaacaggcgttaatgcttcgcttaataccatttcgccagcagctgcctgatgcaatgctttcagcagatcttccggttccatatcttttaacagatagccatccgcgccgcgtttcagtgcggtgaccacatcttcttcatggttagagacgctgaataccacaatgcgcccactgagggacttttcgcgcagtttatccagcgtttccagaccgttcatgccgggcatattgagatctaacaggatcagatcgggatcaagagactccgccagttcaataccctgttcgccattactcgcttcgccaaccacggtgatatctggtgccatactgataagctgttttacgccagttcgcagcatcgggtgatcgtcaatcagcaggatagtagccggttcctgattactcatgggtatctccttggacgtctgtgaaagttttttcgggaataaaggtgaccaccacttcggtgccaccactttcacgacggcggacgcggcaatcgcctcgtaaactttgcgcacgatcgcgcattattatcatgccgtagtgattgctgcggatggcattttcaggcacgccgcagccgttatcctggacggtcagtttgacctgattatcgttttgcgccaccgtcaccacgacttcactcgcttggctatgtttgagggcgttacttaatgcctcacgggcaatttgcaacaagtggattgcctgatggctaggcaccaggcgaggcggcaattgataatccagcttcaccgggaagccaaatttggcgctgtactcttcgcaactcgcctccagcgccggacgtaatccaggctcggtgagctgcaagcggaatgtggtgagcaattcacgcaactgcgcccaggatgcattcagttcgttacggatctgacttaacagttcgcggctgctttctggcagcgcatcgccctgcatctgtaaacaactcacctgcatcttcatgcaagagagagattgggcaatagaatcatgcagttcgcgcgcaatggtggcacgctcttccatcacgatcaactgttgctgacgttcctgatggcgatccagcgccagcgtggcggtgagttgttcaaccagggtatccaccagttgttgttgatcatggctaagatgacgcccctgcggcagggtcgccagcaaaataccgtactgcgtatgagagtcagccagccgccacttcagggtcgtgccgcgatcaccaacgggtaatacgccgcgcgggcagagctggcagcctttatcatcacaagtcatatctggctggcaggtaaactcctgatgattctcttcatcatcagtgtcatacacccgcaattcgatatcacgtagcagggttaaattctgtaagccgttgagtacaggactcaggcgttcacacagcggggcgcgggaatgcaaacggcggttagcctgccataaaaaagagaggatctgatttttatgctccagcccggcggttttctcctgaacccgctgctcaagtacggcataactttcggccagttctgcagacatattgttcaacgcagttccaagcatcgccatttcgttgcgcccgctgatgtttgcgcgttgggtaaaatcgcgatgactgacggcactcgccattgccagcagttgccgccacggttgtagcagtcgcgcccgcaaccagataatagtgaacaccagtaaaagtgccataaataccgccattacccgatggaccagtaccactgtctcgatgcgcatttccgtggtgcggtcaaaaccagataccagttgatcaagcccggcaacaaactggctgacatccgcactcaccgtttctcggttttgtgcacgcatcagcgcagggatcagttcattacgccagtaatcttgtaaaccctgtaattgcgccagttgtccgtctcgttctgctgctcgagtcaactcggcgctaaatgccgtttgttccatctctttaattaagggcttgtctttctcgcttaatggcactgccgccaacagacggtaactttgcatgcgcaggcttcccgctttgttgatcgcatgggcgctgccctgaacgccttgcaccagccagccagaaaccgccatccctgccagtccaatagcagtagaaagcaacacaataagcgcaacctgattaaccagggtgagcggagagagacaacgtttaagcatgtaaacctcttccttcaggctttaaatgagcaataaccttaatgaatgtgacgatacattctggaatggcagtattctcggctattggctgaagtatacccatacccggaaagagttactccttatttgccgtgtggttagtcgctttacatcggtaagggtagggattttacagcaccgtgaaaaatctcataatttttatgaagtcactgtactcactatgggtaatgataaatatcaatgatagataaagttatcttatcgtttgatttacatcaaattgcctttagctacagacactaaggtggcagacatcgaaacgagtatcagaggtgtctatgagtcacagttccgcccccgaaagggctactggagctgtcattacagattggcgaccggaagatcctgcgttctggcaacaacgcggtcaacgtattgccagccgcaacctgtggatttccgttccctgtctgctgctggcgttttgcgtatggatgttgttcagcgctgttgcggtgaacctaccgaaagtcggctttaattttacgaccgatcagctatttatgttgactgcgctgcctagcgtttctggcgcgttattacgtgttccatactcctttatggttcctatcttcggtggtcgtcgctggacggcgttcagcaccggtattctgattattccttgcgtctggctgggttttgccgtgcaggatacctccacgccttatagcgtcttcatcatcatctctctgctatgcggctttgctggcgcgaacttcgcatccagtatggcaaacatcagcttcttctttccgaaacagaagcagggtggcgcgctgggtctgaatggtggtctgggaaacatgggcgtcagcgtcatgcagttggttgctccgctggtggtaagtctgagcattttcgcagtatttggtagccagggcgtcaaacagccggatgggactgagctgtatctggcgaatgcgtcctggatatgggtgccgttccttgccatcttcaccattgcggcgtggtttggcatgaacgatcttgctaccagcaaagcctccatcaaggagcagttgccggtactcaaacggggtcatctgtggattatgagcctgctgtatctggcaaccttcggctccttcatcggcttctccgcgggctttgcaatgctgagtaaaacgcagttcccggatgttcagattctgcaatacgctttcttcgggccgtttattggtgcgctggcgcgttctgcaggtggtgcattatctgaccgtctgggcggaactcgtgtcacgctggtgaactttattctgatggcgattttcagcggcctgctgttcctgaccttaccgactgacgggcagggcggaagcttcatggcgttcttcgcggtcttcctggcgctgttcctgacagctgggctgggtagtggttccactttccagatgattagtgtgatcttccgtaaactgacaatggatcgcgtgaaagcagaagggggttctgacgaacgtgcgatgcgtgaagcggcaaccgacacggcggcggcgctgggtttcatctctgcgattggcgcgattggtggcttctttatcccgaaagcgtttggtagcagcctggcattaacgggtagcccagtcggcgcaatgaaggtatttttgattttctatatcgcctgcgtagtgattacctgggcggtatatggtcggcattctaaaaaataaaccgttactcgtcatacttcgggttacatgtgctgcggctgcgttcattcaccccagtcacttactttagtaagctcctgggattcattcacttgccgccttcctgtaaaccgaattatatagagtaaaatatttgattatcctttgcgcggcatgatgtcgcgctttttttatgcgtcatttagttacaacatactaatgttatatggtttatttcgccggatttcattaagagccattaatatgttacccatggggaatactccttaatacccatctgcataaaaatcttaatagtttaaataactacaggtataaaacgtcttaatttacagtctgttatgtggtggctgttaattatcctaaaggggtatcttaggaatttactttatttttcatccccatcactcttgatcgttatcaattcccacgctgtttcagagcgttaccttgcccttaaacattagcaatgtcgatttatcagagggccgacaggctcccacaggagaaaaccgatgagtaaattcctggaccggtttcgctacttcaaacagaagggtgaaacctttgccgatgggcatggccagcttctcaataccaaccgtgactgggaggatggatatcgccagcgttggcagcatgacaaaatcgtccgctctacccacggggtaaactgcaccggctcctgcagctggaaaatctacgtcaaaaacggtctggtcacctgggaaacccagcagactgactatccgcgtacccgtccggatctgccaaaccatgaacctcgcggctgcccgcgcggtgccagctactcctggtatctttacagtgccaaccgcctgaaatacccgatgatgcgcaaacgcctgatgaaaatgtggcgtgaagcgaaggcgctgcatagcgatccggttgaggcatgggcttctatcattgaagacgccgataaagcgaaaagctttaagcaggcgcgtggacgcggtggatttgttcgttcttcctggcaggaggtgaacgaactgatcgccgcatctaacgtttacaccatcaaaaactacggcccggaccgtgttgctggtttcagcccaattccggcaatgagcatggtttcttacgcaagcggtgcacgctatctcagcctgattggcggtacttgcttaagcttctacgactggtactgcgacttgcctcctgcgtctccgcaaacctggggcgagcaaactgacgtaccggaatctgctgactggtacaactccagctacatcatcgcctgggggagtaacgtgccgcagacgcgtaccccggatgctcacttctttactgaagtgcgttacaaagggaccaaaactgttgccgtcacaccagactacgctgaaatcgccaaactgtgcgatctgtggctggcaccgaaacagggcaccgatgcggcaatggcgctggcgatgggccacgtaatgctgcgtgaattccacctcgacaacccaagccagtatttcaccgactatgtgcgtcgctacaccgacatgccgatgctggtgatgctggaagaacgcgacggttactacgctgcaggtcgtatgctgcgcgctgctgatctggttgatgcgctgggccaggaaaacaatccggaatggaaaactgtcgcctttaataccaatggcgaaatggttgcgccgaacggttctattggcttccgctggggcgagaagggcaaatggaatcttgagcagcgcgacggcaaaactggcgaagaaaccgagctgcaactgagcctgctgggtagccaggatgagatcgctgaggtaggcttcccgtactttggtggcgacggcacggaacacttcaacaaagtggaactggaaaacgtgctgctgcacaaactgccggtgaaacgcctgcaactggctgatggcagcaccgccctggtgaccaccgtttatgatctgacgctggcaaactacggtctggaacgtggcctgaacgacgttaactgtgcaaccagctatgacgatgtgaaagcttataccccggcctgggccgagcagattaccggcgtttctcgcagccagattattcgcatcgcccgtgaatttgccgataacgctgataaaacgcacggtcgtagcatgattatcgtcggtgcggggctgaaccactggtatcacctcgatatgaactatcgtggtctgatcaacatgctgattttctgcggctgtgtcggtcagagcgggggcggctgggcgcactatgtaggtcaggaaaaactgcgtccgcaaaccggctggcagccgctggcgtttgcccttgactggcagcgtccggcgcgtcacatgaacagcacttcttatttctataaccactccagccagtggcgttatgaaaccgtcacggcggaagagttgctgagtccgatggcggacaaatcccgctataccggacacttgatcgactttaacgtccgtgcggaacgcatgggctggctgccgtctgcaccgcagttaggcactaacccgctgactatcgctggcgaagcggaaaaagccgggatgaatccggtggactatacggtgaaatccctgaaagagggttccatccgttttgcggcagaacaaccagaaaacggtaaaaaccacccgcgcaacctgttcatctggcgttctaacctgctcggttcttccggtaaaggtcatgagtttatgctcaagtacctgctggggacggagcacggtatccagggtaaagatctggggcaacagggcggcgtgaagccggaagaagtggactggcaggacaatggtctggaaggcaagctggatctggtggttacgctggacttccgtctgagcagcacctgtctctattccgacatcattttgccgacggcgacctggtacgaaaaagacgacatgaatactagcgatatgcatccgtttattcacccgctgtctgcggcggtcgatccggcctgggaagcgaaaagcgactgggaaatctacaaagccatcgcgaagaaattctccgaagtgtgcgtcggccatctgggtaaagaaaccgacatcgtcacgctgcctatccagcatgactctgccgctgaactggcgcagccgctggatgtgaaagactggaaaaaaggcgagtgcgacctgatcccaggtaaaaccgcgccacacattatggtcgtagagcgcgattatccggcgacttacgaacgctttacctctatcggcccgctgatggagaaaatcggtaatggcggtaaagggattgcctggaacacccagagcgagatggatctgctgcgtaagctcaactacaccaaagcggaaggtccggcgaaaggccagccgatgctgaacaccgcaattgatgcggcagagatgatcctgacactggcaccggaaaccaacggtcaggtagccgtgaaagcctgggctgccctgagcgaatttaccggtcgtgaccatacgcatctggcgctgaataaagaagacgagaagatccgcttccgcgatattcaggcacagccgcgcaaaattatctccagcccgacctggtctggtctggaagatgaacacgtttcttacaacgccggttacaccaacgttcacgagctgatcccatggcgtacgctctctggtcgtcagcaactgtatcaggatcaccagtggatgcgtgatttcggtgaaagcctgctggtttatcgtccgccgatcgacacccgtagcgtgaaagaagtgataggccagaaatccaacggcaaccaggaaaaagcgctcaacttcctgacgccgcaccagaagtggggtatccactccacctacagcgacaacctgctgatgctgactttaggtcgcggtggtccggtggtctggttgagtgaagccgatgccaaagatctgggtatcgccgataacgactggattgaagtcttcaacagcaacggtgctctgactgcccgtgcggttgtcagccagcgtgttccggcagggatgaccatgatgtaccacgcgcaggaacgtatcgttaacctgcctggtagcgaaattacccaacagcgtggtggtatccataacagcgtcacccgtatcacgccgaaaccgacgcatatgatcggcggctatgcccatctggcatacggctttaactactatggcaccgtaggttctaaccgcgatgagtttgttgtagtgcgtaagatgaagaacattgactggttagatggcgaaggcaatgaccaggtacaggagagcgtaaaatgaaaattcgtagtcaagtcggcatggtgctgaatctcgataagtgcatcggctgccacacctgtagtgttacctgtaaaaacgtctggaccagccgtgaaggcgtggaatatgcgtggttcaacaacgtggaaaccaagccgggccagggcttcccgactgactgggaaaaccaggaaaaatacaaaggcggctggatccgtaaaatcaacggcaaactgcagccgcgcatgggtaaccgtgccatgctgctgggtaaaatcttcgctaacccgcatctgccggggatcgacgattattacgagccgttcgattttgactatcagaacctgcataccgcgccggaaggcagcaaaagccagccgattgcccgtccgcgtagcctgattaccggggaacggatggcgaaaatcgaaaaagggccgaactgggaagatgacctgggcggtgagtttgacaaactggcgaaagacaagaacttcgacaacatccagaaggcgatgtatagccagttcgaaaacaccttcatgatgtatttgccgcgcctgtgcgaacactgcctgaacccggcatgtgtggcgacctgcccgagcggtgcgatttacaagcgtgaagaagatggcatcgtcctgatcgaccaggataaatgccgtggctggcgtatgtgcatcactggatgcccgtacaaaaaaatctacttcaactggaagagcggtaagtctgagaagtgcatcttctgctatccgcgtattgaagcgggtcagccgaccgtgtgcagtgaaacctgtgtcggtcgtatccgttatcttggcgtgctgttgtacgatgccgacgctattgaacgtgcagccagcaccgagaacgagaaagatctttaccagcgtcagctggacgtgttcctcgatccgaacgatccgaaagtcatcgagcaggcgattaaagacggtattccgctgagcgttattgaagccgcacagcagagcccggtttataaaatggcaatggaatggaaactggcgctgccgctgcatccggaatatcgcacactgccgatggtctggtacgtgccgcctctgtctccgattcagtctgcagcagacgcgggtgagctgggtagcaacggcattctgccagacgtcgaaagcctgcgtattccggtacagtatctggcgaatctgctgaccgccggtgataccaaaccggtactgcgcgcactgaaacgtatgctggcgatgcgtcattacaaacgtgctgaaaccgttgacggtaaagttgatacccgtgcgctggaagaggtcggtctgaccgaagcccaggcacaggagatgtaccgttatctggcgattgctaactacgaagatcgctttgtggtgccgagtagtcatcgtgaactggcacgggaagccttcccggagaaaaatggctgcggctttacctttggtgatggctgccacggtagtgataccaaattcaatctgttcaacagccgtcgtatcgatgccatcgatgtgaccagcaaaacggagccgcatccatgatcgaactcgtgattgtaagccgtctccttgaatatccggatgctgccttatggcagcatcaacaagagatgtttgaggcgattgccgcgagcaaaaatctgccaaaagaggatgcccatgcgctgggcattttcctgcgcgatttaacgacgatggatccgctcgatgcccaggcgcagtacagcgaactgttcgaccgtggccgcgccacgagtctgttgctgtttgaacatgtgcacggcgaatcccgcgaccgcggccaggcgatggtggacctgctggcgcagtacgagcagcacggcttgcagttaaacagccgcgaattgccggaccatctgccgctgtatctggagtacctggcgcagctgccgcaaagcgaagccgtggaaggtttgaaagatatcgcgccgattctggcattgctgagcgcgcgtctgcaacagcgtgaaagccgttatgccgtgctgtttgatctgctgctgaaactggcgaataccgctatcgacagcgacaaagtggcggaaaaaattgccgacgaagcgcgcgatgatacgccgcaggcgctggatgctgtctgggaagaagagcaggttaaattctttgctgacaaaggctgcggtgatagtgcaatcactgcgcatcagcgtcgctttgccggtgccgtcgcgccgcaatatctgaatatcaccaccggaggacagcactaatgcaattcctgaatatgttcttctttgatatctacccgtacatagccggggcggtcttcctgattggtagctggctgcgttatgactacgggcagtacacctggcgcgcggcgtccagccagatgctggatcgcaaagggatgaacctggcgagcaacctgttccatatcgggattctggggatttttgtcggtcacttcttcggtatgctgacgccgcactggatgtatgaagcctggctgccgattgaagtgaaacagaaaatggcaatgtttgctggtggtgccagcggcgtgctgtgtctgattggcggcgtgctgttgctgaaacgtcgtctgttcagcccacgcgtgcgtgcaaccactaccggagcggatatcctgatcctgagcctgctcgttatccagtgcgcgctgggcctgttgaccattccgttctccgctcagcatatggacggtagcgagatgatgaaactggttggctgggcgcagagcgtggtgaccttccacggtggcgcttctcaacacctcgatggtgtggcgtttatcttccgtctgcacctggtgctggggatgacgttattcctgctgttcccgttcagccgtctgatacacatctggagcgtaccggtggagtatctgacacgtaagtaccagctggtgcgcgctcgtcactaagcgaattttagttcacatagaccctgcttcggcggggtttttttatgggcacggtgcggggtgagttgtcggatgcgcttcgcttatccgacctacaggggaggatattgtaggcccggtaaacgtggtgccatcgggcaaaattagctcggagtaacaggttttgattatttaaggaagcgatggtggtgggggaaggattactcagcgctgcgcgcttcgcccttcgggtcgttgcctgcggcaacgctctcagcctggcgctcaagagcaaccttggtcgaagcttcagttccttccccgcttgggcagaatatttgattgcggatagctttgagaattccggggcttttgaaagtgatggtggtgggggaaggattactcagcgctgcgcgcttcgccctagcggtcgttgcctgcggcaacgctctctcgctgacgctcgagccgaaccttaatcgaagcttctcatccttccccgcatgggcagaatatttgattgcggattcgcttgagagttcagggacttttgaaagtgatggtggtgggggaaggattactcagcgctgcgcgcttcgcccttcgggtcgttgcctgcggcaacgctctctcgctggcgctcgagtgctaccttggtcgaagcttctcatccttccccgcatgggcagaatatttaattgcggattcgttgggaagttcagggacttttgaaagtgatggtggtgggggaaggattcgaaccttcgaagtcgatgacggcagatttacagtctgctccctttggccgctcgggaaccccaccaggggtaattcaaattttgaggtaatgcttgagatggtggtgggggaaggattattcgtcgcttcgctcctcacccttcgggccgttgcctgtggcaacgttctctcgctttcgctcgaatcgaaccttagtcgaaggttctcacccttccccgatgagtgcaaactttcacaatctcaccgaagttaccacatcgctgtggtgaattatggtggtgggggaaggattcgaaccttcgaagtcgatgacggcagatttacagtctgctccctttggccgctcgggaaccccaccacggggtaatgctttttactggcctgctcccttatcgggaagcggggcgcatcatatcaaatgacgcgccgctgtaaagtgttacgttgagaaaaatgaactggttgcgtaattttcatccgtaacggattaaaggtaaccagttatttttgctggcgattaaagaataatcgttcgattaccgtaaacaaagacgcgctgtgccagtactttgtatagtgcacgacttaagacgtttttctcgacgtcacgacctgcgcgcatcatatcttcagctgtgtaggtatgatcgacatgaataacgtcctgcatgatgattgggccttcgtccagattgtcattcacatagtgagcggttgcgccaataatcttcacaccacgttcataggcctggtgataaggacgtgcgccaataaacgctggcaggaaactatggtgaatattgatgatcttattcgggaagcgtgccacaaattccggcgttaatacccgcatatacttcgccagcaccacgtagtcaggttgataagcatcaatggcatccgccatcttttgatcgtgctcgttgcgggttaacccttcatggcttaccagctcaaacggaatatcaaaacgctcaaccagagaacgtaaagtatcgtggttaccaataactgccgcgatttcgacatccaggccgccgtaattggctttcatcaacaaatcgccaaggcaatgcgcttctttagtgaccagaatcactatccggcgacgaccggcaggattcagctcacgcacggagccttctggcaatgcgctatcgagatccgccagcagggtggaatcattaaaaatcccttccagttccgtgcgcataaaaaagcgcccggtacggtgatcaacaaattcattgttctgtacgatatttaactcgtgcttgtagcaaatattggtaatacgtgcgatcagacctttttggtccggacaaatagtacgcagaactttacgttggagactatgcattgctggaaaaaccttgttgagagtgtttgctaaaccgtaccgtcaaccattattggccgcagcactttttaaattttttaccactaccacaagggcagggatcgttgcgaccaaactgcggacgtgtaccgtcaatatagtaccattgaccgttttctttcaaaaatcggctacgttcaattattgcacctgttttaccaccttcggtaaatcgagcaacaaaactgacaaatccgatattgtcggcgtcctgccaacaatgttcaaatacggtcaatcccaaccattcagtatgcgcaaatccggccatcaattcggcacgtaacgccgctgctccacaagagggatgccaggtctttattaaataatctgcgtcttgcatcacaaaagcgcagtaacggctacgcatgagatgttctggatcaggtgcaaccttttcaccagacacataagggtggcaacataggctatactcgacagcactaccacagggacaaagctgagacacaaataatctccctggaaacaataacggcgtattaaccgcctgagtagcactatgttaaccgagcagtagcgatgtggctacgattgcattccaggggaatcttgcgggaataatgagaaagataaaaatagggctggcgctgggatctggcgcggcgagaggttggagccatattggcgttattaatgcgctaaaaaaagtgggtattgaaattgatatcgttgcaggatgtagtattggtagcctggtgggcgctgcctatgcatgcgatcgattatctgcgctggaagattgggtgacctctttcagttattgggatgttttacgcctgatggatctctcctggcagcgcggtgggttactgcgcggcgagcgtgtcttcaatcaataccgcgaaataatgccggaaacagagatcgaaaattgttcccgtcgctttgcggctgttgccaccaatttaagtacgggacgtgaattatggtttactgaaggcgatctccatcttgctattcgcgcaagttgcagtattccaggactcatggcacctgttgcacataacggctactggctggttgatggagcagtcgttaacccaattcctatttccctcacgcgtgcattgggggctgatattgtgatagcggttgacctgcagcacgatgctcatttgatgcaacaagatttgctctcctttaatgtcagtgaagaaaatagcgagaatggtgattctctgccgtggcatgcgcgtctgaaagaaaggttaggcagcataacgacacgtcgggcggtgacagcgccaacggcaacagagattatgaccacttctatccaggtgctggagaaccgccttaaaaggaaccgcatggcaggtgatccgcccgatattctgattcaacctgtttgcccgcaaatatctacgcttgatttccatcgcgcgcacgctgccattgcggccggacagctggcagtggaaaggaaaatggacgaacttttgccgttggtacgcaccaacatttgaccagaatttttatctacacttaagttaattctgacaggcgcaggtggcaatagcatgccactattgagtaaagccagtcaggggagagaacatgacgcagccattggtcggaaaacagattctcattgttgaagatgagcaggtatttcgcagccttctggatagttggttttccagtttgggagcgacaacggtactggcggctgatggggtggatgcccttgagttgctgggaggtttcactccagacctgatgatatgtgatatcgcgatgccacgaatgaacgggcttaaactgctggagcatatacgtaacagaggcgaccagaccccagttctggtgatatctgccactgaaaatatggcagatattgccaaagcgttacgtctgggcgttgaagatgttttgctgaaaccagttaaagatctgaatcgcttgcgcgagatggtttttgcctgtctctatcccagcatgtttaatagccgcgttgaggaagaggaaaggctttttcgcgactgggatgcaatggttgataaccctgccgcagcggcgaaattattacaggaactacaaccgccggttcagcaggtgatttcccattgccgggttaattatcgtcaattggttgccgcggacaaacccggcctggtgcttgatattgccgcacttagcgaaaacgatctggcattttattgccttgatgtcacccgagctggacataatggcgtacttgctgccttgttattacgcgcattgtttaacggattattacaggaacagcttgcacaccaaaatcaacggttgccagagttgggcgcgttattgaagcaggtaaaccatttacttcgtcaggccaatctgccggggcagtttccgctattagttggctattatcatcgcgaactgaaaaatctcattctggtttctgcgggtctgaatgcgacgttaaataccggcgaacaccaggtgcaaatcagtaatggtgttccgttaggcactttaggtaacgcttatttgaatcaattgagccagcgatgcgatgcctggcaatgccaaatatggggaaccggtggtcgactgcgcttgatgttgtctgcagaatgagcaaacgataacgcgggctaaatttgcattacctgctaatgtcggctggtggtactatcgtcgccattcgtataagtaattgtcttaattatgctaactcgcctccttttcagaacttagccccttcggggtgctgatatactgggatgcgatacagaaatatgaacacgttcaaaacacgaacagtccaggagaatttaaatggctgccattaatacgaaagtcaaaaaagccgttatccccgttgcgggattaggaaccaggatgttgccggcgacgaaagccatcccgaaagagatgctgccacttgtcgataagccattaattcaatacgtcgtgaatgaatgtattgcggctggcattactgaaattgtgctggttacacacagttctaaaaactctattgaaaaccactttgataccagttttgaactggaagcaatgctggaaaaacgtgtaaaacgtcaactgcttgatgaagtgcagtctatttgtccaccgcacgtgactattatgcaagttcgtcagggtctggcgaaaggcctgggacacgcggtattgtgtgctcacccggtagtgggtgatgaaccggtagctgttattttgcctgatgttattctggatgaatatgaatccgatttgagtcaggataacctggcagagatgatccgccgctttgatgaaacgggtcatagccagatcatggttgaaccggttgctgatgtgaccgcatatggcgttgtggattgcaaaggcgttgaattagcgccgggtgaaagcgtaccgatggttggtgtggtagaaaaaccgaaagcggatgttgcgccgtctaatctcgctattgtgggtcgttacgtacttagcgcggatatttggccgttgctggcaaaaacccctccgggagctggtgatgaaattcagctcaccgacgcaattgatatgctgatcgaaaaagaaacggtggaagcctatcatatgaaagggaagagccatgactgcggtaataaattaggttacatgcaggccttcgttgaatacggtattcgtcataacacccttggcacggaatttaaagcctggcttgaagaagagatgggcattaagaagtaacatccgtatcggtgttatccacgaaacggcgttgagcaatcgacgccgtttttttatagcttattcttattaaattgtcttaaaccggacaataaaaaatcccgccgctggcgggattttaagcaagtgcaatctacaaaagattattgcttgatcaggaaatcgtcgagggatttaccttgctcatccattgcttttttgattacagctggagtacggccttggccagtccaggttttagtttcgccgttttcgtcaacgtagctatattttgccggacgctgagcacgtttagctttggtgccagatttaacggcagcaaggctattcagcagttcgttcgggtcaataccgtcagcgatcagcatttcgcgatattgctgcagtttacgagtgcgctcttcaacttcagcagcagccgcgctttcttcttcgcgacgttcgttaacaacaacttctaatttttccagcatttcttccagcgtttcaagtgtacattctcttgcctgcgcacgaagagtacggatgttgttcagaattttaagtgcttcgctcattgtagtaatctcaaacttatattggggtggtttgttgaggtaataatagagccttaaattcagttgtgcaatagccaggaatgtaaggaattcaaaattgttctttattttgtgccgccaataaatatcttttcataaaattagccagaaaagacgcggcatatagccctatttacaccgatgatttcgcagcacgtgaggttaaaacttcctgattcatgtcacattttatggggagattatcgtaggctgacgacctttcagtcttctgtattagttgtgtttacgagaattccctattaagcgaatgatgaaaagtagaacagtcgcaataagagcatggacttagtattgcactatctcctggaggtcaacagagggctattacttgcgcaacaggttaaagattgtgaatagttaccagcagtcatttacccgcttataacaagcgaggcagttgtaatgatagctcagaaggattatgcaaggcttcgtaagggagaacgcatatacccacttctgtgcatactgttgagctgaaaaactgacgaattatgataaactccagccaactttatttcatatcattgagggcctgtggctgatggcacagctatatttctactattccgcaatgaatgcgggtaagtctacagcattgttgcaatctagttacaattaccaggaacgcggcatgcgcactgtcgtatatacggcagaaattgatgatcgctttggtgccgggaaagtcagtagccgtataggtttgagtagccctgcaaaattatttaaccaaaatagtagtttatttgatgagattcgtgcggaacatgaacagcaggcaattcattgcgtactggttgatgaatgccagtttttaaccagacaacaagtatatgaattaagcgaggttgtcgatcaactcgatatacccgtactttgttatggtttacgtaccgattttcgaggtgaattatttattggcagccaatacttactggcatggtccgacaaactggttgaattaaaaaccatctgtttttgtggccgtaaagcaagcatggtgctgcgtcttgatcaagcaggcagaccttataacgaaggtgagcaggtggtaattggtggtaatgaacgatacgtttctgtatgccgtaaacactataaagaggcgttacaagtcgacagtttaacggctattcaggaaaggcatcgccacgattaataagaatttctttactgacagggtgagcagggcacttttatcctgtcagttcgttttacgcacttcttccgggctatatacccttctcggcagttttttaacgccgctatacgcctcacagggctcttaagcaccgacgttgacttgtgacctgtaaagtacaatatccctgtgtttaggcgttatacatcgtcgcaaatatgatgaaggctaatgctgtcggtttatggaaaagttgctttgggtaaacaaaaaatacggccccagaagggcaatgccgttcacttaagaggagcggcactatgtttcacaggataacgggtttttgatatcttaaccgacctcggccttgatggtcgggggcgttttgttatgaacaccacttccagagcaccccgaagatgctccagtcgtttcgggatggtccctggtgacgccgtgtttcccagctctatcatttctgatgcgatattcttccacgcaggcagtagccagtggcggttacaacccttctggttcagcgtcagcagcaggtcttcgctgtaaaaaagtttatcaaacaacgtaatagagttatccgggatggtggcgagcatggagtgggccagcacagtttcgctctgccggtaaggtgcggtcacggcattcagcagaatgtgacttcccaggttcattaaggccaccagacgcataaccgggtaggcgttctgccgcttagtggatgtgttggcagacccataatattcacgcagctcgggtttatcaggtgtcctgaactgtgcgccatcaatggcaaaaagttgcaggccgtgccagtcatccttcaggtaacgttccgcgcccctgtctgtgcggtctggcggaagagccattccactggggcggcccccacgcgctgacgcgcctgggtgacagcgctgcgggccagcaggttcatccccgcttcgccatccgcgctcaggttcagacggcgaacaacatcggtaattggctcattgcaccaccatccagataaccatgtcccccggtaaacgacggcggcgaacggtcgcatgagcagaaagcgtcaggcagtgttgtatccactcggtgggaaggtgttctgcaaatagttgtgcagagggcggaggcataagcggatggtcactgaaatcgagcagatcattgagaagtggcataagaaaacggctccctgttgtggaagccgttatagtgcctcagtttaaggatcggtcaactaatccttaactgatcggcattgcccagaaggggccgtttatgttgccagacagcgctactgattaagcggattttttcgcttttttctcagctttagccggagcagcttctttcttcgctgcagtttcaccttctacataatcacgaccgtagtaggtatccagcagaatctgtttcagctcggagatcagcgggtaacgcgggttagcgccggtgcactggtcatcgaatgcatcttcagacagtttatccacgttcgccaggaagtctgcttcctgaacgccagcttcacggatagatttcggaatacccagttcagctttcagcgtttccagccatgccagcagtttctcgatcttagcagcagtacggtcgcccggtgcgctcagacccaagtggtcggcaatttcagcataacgacggcgagcctgcggacggtcatactggctgaatgcagtctgcttggtcgggttgtcgttcgcattgtagcgaataacgttacaaatcagcagggcgtttgccagaccgtgcggaatatggaactgggaacccagtttgtgcgccatactgtgacatacacccaggaaggcgttcgcaaacgcgatacccgcgatagtcgctgcactgtgaacacgttcacgcgctaccggatttttagacccttcgtggtaggacgctggcagatattctttcagcagtttcagtgcctgcagagcctgaccatcagagaactcagatgccagtacagaaacataagcttccatggcgtgagttactgcgtccagaccaccgaaagcacacagggacttcggcatgtccataaccaggttggcgtcgacaatcgccatatccggagtcagcgcatagtctgccagcggatatttctgaccagtagcgtcgtcagttacaaccgcaaacggagtgacttcagaacctgtaccagaagtggtggtgacagcgatcattttcgctttcacgcccattttcgggaacttgtagatacgtttacggatatccataaagcgcagcgccagctcttcgaagtgagtttccggatgttcgtacataacccacatgatcttcgcggcgtccatcggggaaccaccacccagcgcgataatcacgtctggtttgaaggagtttgccagttctgcacctttacgaacgatgctcagggtcgggtccgcttctacttcgaagaagacttcagtttcaacgcctgctgctttcagtacggaagtgatctgatcagcataaccattgttgaacaggaagcggtcagtcacgatgagcgcacgtttgtggccatcagtaatcacttcatccagcgcgattggcagggagccacggcggaagtagatagatttcggaagtttgtgccacaacatgttttcagctcgcttagcaacggttttcttgttgatcaggtgtttcggaccaacgttttcagagatggagttaccaccccaagaaccacaacccagagtcagggaaggtgcgagtttgaagttatacaggtcaccgataccaccctgagacgctggggtgttaatcaggatacgcgccgttttcattttctgaccgaagtaagaaacgcgagccggttggttatcctggtcagtgtacaggcaagaggtatgaccgataccgcccatagcaaccagtttctctgctttttctaccgcgtcttcgaaatctttagcgcggtacattgccagagtcggggacagtttttcatgtgcgaacggttcgctttcatcaacaacggtcacttcaccgatcagaatcttggtgttttctggtacagagaagcctgccagttcagcaattttataggctggctgaccaacgatagccgcgttcagcgcaccgtttttcaggataacatcctgaacagctttcagctctttaccctgcaacagatagccgccgtgggttgcaaaacgttcacgtacagcgtcataaacagagtcaacaacaacaacagactgttcagaagcacagattacgccgttgtcgaaggttttggacatcagtacagatgcaactgcacgtttgatatcagcagtttcatcgataacaactggagtgttgcccgcgcctacaccgatagctggtttaccggagctgtatgcggctttaaccatgcccggaccaccagtcgcgaggatcaggttgatgtctgggtggtgcatcagtgcgttagacagttcaacagaaggttgatcgatccagccgatcagatctttcggagcaccggcagcgatagcagcctgcagaacgatatcagccgctttgttggtggcatcttttgcacgcgggtgcggggagaagataatggcgttacgggtcttcagactgatcaggcttttgaagatagcagtactagtcgggttagtggtcggaacgataccgcaaataataccgattggttcagcgatagtgatggtaccaaaagtgtcgtcttcagacagaacaccacaggttttttcatctttataggcgttgtagatatattcagaagcaaagtggtttttgatcactttatcttcgacgatacccatgccggattcggcaacggccattttcgcgagtgggattcgagcatctgcagcagccagagcggcggcgcggaagattttgtctacttgctcttgagtgaaactggcatattcacgctgggctttttttacacgctctacgagtgcgttaagttcagcgacattagtaacagccataatgctctcctgataatgttaaacttttttagtaaatcatctgctcgaatacgagagtatagtcagtgcggtgatgatttgcttaacctatgaaaatcaaaagcttactcgcgctcacactcactgtgatttactaaaagagtttaaacattagagttattatctctaatgcgtcacttccaggtggcgtaagcaagattactcacttctgggtactgattacgtgatccaaatcaaatttttgcaaagctgacacctttcagcatcgcttttcgccattatagctaacagttaataaattgtagtatgatttggtggctacattagcatgttttgcacaactagataacaataacgaatgatagcaattttaagtagttaggaggtgaaaaatgctgtcaaaaggcgtattgtcagcgcgtcttttcaaccttatttatggctaacattatccggcttttgcttcggagctaaccgtgattcagaccttttttgattttcccgtttacttcaaatttttcatcgggttatttgcgctggtcaacccggtagggattattcccgtctttatcagcatgaccagttatcagacagcggcagcgcgaaacaaaactaaccttacagccaacctgtctgtggccattatcttgtggatcagcctttttctcggcgacacgattctacaactttttggtataagtattgatagcttccgtatcgccgggggtatcctggtggtgacaatagcgatgagcatgatcagcggcaagcttggcgaggataaacagaacaagcaagaaaaaagtgaaaccgcggtacgtgaaagcattggtgtggtgccactggcgttgccgttgatggcggggccaggggcgatcagttctaccatcgtctggggtacgcgttatcacagcattagctatctgtttggtttctttgtggctattgcattgttcgctttatgttgttggggattgttccgcatggcaccgtggctggtacgggttttacgccagaccggcatcaacgtgattacgcgtattatggggctattgctgatggcattggggattgaatttatcgttactggtattaaggggattttccccggcctgcttaattaattcctttcaaatgaaacggagctgccatgctccgtttacttcgtcattatttttactttgttcccgcgcagttatcaaaagcaaaaggaataggtaaaaatattcttctcaaattacagttagttataaggatttccttaactgcttctcctcaccatcatgttattttcgccacatcataatcctgggcttgctgaagaataattgaaatgatattattaattccactgcctttggtagaggaaagtgctaaataataatcaattgttaaattattgtgcatttcactactggaactgtaatcagaaaagatagacatgcttagccaatctctatttgattgaattgaaagatgtttgttaaggcatggatgcaagctatagattctgatacggtcaataaaagagaattgcttaacaattttgcaaaatgtattggcgagtaagaaccgcatttggtactttccgggcaaccgccagacgattctttattggtaatgagaataattaacaattaaagagcgtcgcgaaagaataatgtgtctcgacaggggagacacagtacgaatcgacataaggtgatcgtctgaatcaccagaataaataaagtcggtgatagtaatacgtaacgataaagtaacctgacagcagaaagtctccgagcctgtgcagggtcccaatccgggattacacatgctggttaataccagtaattataatgagggagtccaaaaaacaatgaccaacatcaccaagagaagtttagtagcagctggcgttctggctgcgctaatggcagggaatgtcgcgctggcagctgatgtacccgcaggcgtcacactggcggaaaaacaaacactggtacgtaacaatggtagtgaagttcagagtttagatccgcacaaaattgaaggtgttccggagtctaatatcagccgagacctgtttgaaggcttactggtcagcgatcttgacggtcatccagcacctggcgtcgctgaatcctgggataataaagacgcgaaagtctggaccttccatttgcgtaaagatgcgaaatggtctgatggcacgccagtcacagcacaagactttgtgtatagctggcaacgttctgttgatccgaacactgcttctccgtatgccagttatctgcaatatgggcatatcgccggtattgatgaaattcttgaagggaaaaaaccgattaccgatctcggcgtgaaagctattgatgatcacacattagaagtcaccttaagtgaacccgttccgtacttctataaattacttgttcacccaagtactagtccggtgccaaaagccgctatcgagaaattcggcgaaaaatggacccagcctggtaatatcgtcaccaacggtgcctataccttaaaagattgggtcgtaaacgaacgaatcgttcttgaacgcagcccgacctactggaacaacgcgaaaaccgttattaaccaggtaacctatttgcctattgcttctgaagttaccgatgtcaaccgctaccgtagtggtgaaatcgacatgacgaataacagcatgccgatcgaattgttccagaagctgaaaaaagagatcccggacgaagttcacgttgatccatacctgtgcacttactattacgaaattaacaaccagaaaccgccattcaacgatgtgcgtgtgcgtaccgcactgaaactaggtatggaccgcgatatcattgttaataaagtgaaagcgcagggcaacatgcccgcctatggttacactccaccgtatactgatggcgcaaaattgactcagccagaatggtttggctggagccaggaaaaacgtaacgaagaagcgaaaaaactgctggctgaagcgggttataccgcagacaaaccgttgaccatcaacctgttgtataacacctccgatctgcataaaaagctggcgattgctgcctctagtttgtggaagaaaaacattggtgtaaacgtcaaactggttaaccaggagtggaaaacgttcctcgacacccgtcaccagggtacttttgatgtggcccgtgcaggctggtgtgctgactacaacgaaccaacttccttcctgaacaccatgcttagcaacagcagcatgaataccgcgcattataagagcccggcctttgacagcattatggcggaaacgctgaaagtgactgacgaggcgcagcgcacagctctgtacactaaagcagaacaacagctggataaggatagcgccattgttcctgtttattactacgtgaatgcgcgtctggtgaaaccgtgggttggtggctataccggcaaagatccgctggataatacctatacccggaatatgtacattgtgaagcactaatggcaatacgtggggcaggagtgtcctgctccacggtgtctgatttttatcgcattacagaaggcacaggccagaaggtagggcaatgttaaaatttattctacgtcgctgtctggaagcgattccgatgctatttattcttattactattagcttctttatgatgcgcctcgcgccgggaagcccttttaccggcgaacgtactttaccgccagaagtgatggccaatatcgaagcgaaatatcatcttaatgatccgatcatgacacagtatttcagctacctgaaacaactggcgcacggtgatttcggtccaagctttaaatataaagattatagcgtcaatgacttggttgcatccagttttcccgtttctgccaaactgggagccgcagcatttttccttgcggtaatactgggtgttagtgctggcgttattgccgcattaaaacaaaacaccaaatgggactataccgtgatggggctggcaatgaccggggttgttatccccagttttgtggttgcaccattattagtcatgatatttgcgatcattttgcattggctgccgggcggtggctggaatggtggggcgcttaaattcatgatattgccgatggtggcgttgagtctcgcttatatcgccagtattgcgcgtattacccgtggctctatgattgaagtattacactccaattttattcgtactgcccgggcgaaagggttacctatgcggcggatcattttacgtcacgcattaaaacctgctctgttacccgtgctctcttatatgggccccgcatttgtcggcattattaccggttctatggttatcgaaaccatttatggtttgccggggattggacaactgttcgttaatggcgcattgaaccgtgactattccttagtgttaagcctgaccatcctggttggtgctttaaccattttgtttaatgccattgtcgatgtgctatatgcggttatcgacccgaaaatccgttactgatactggagctcgcgatgatgttaagtaagaaaaacagcgagacgctggaaaatttcagtgaaaagctggaggtcgaagggcgcagcttgtggcaggacgcacgtcgacgttttatgcataaccgtgcggcggttgccagtctgatagtgctggtgctgatcgcgttatttgtaatcctggcaccgatgctttcccagtttgcctatgacgatactgactgggcgatgatgtccagcgccccggatatggagtccggtcactactttggtactgacagttccggtcgcgacctgcttgtgcgcgttgcgattggcgggcgtatcagtctcatggtcggtgttgctgcggcactggtggctgtggtcgtcgggacactttatggtagcctttccggttatctgggcggtaaagtggatagcgtaatgatgcgtctgctggaaatcctcaactccttcccattcatgttcttcgtcattttgctggtgacctttttcggtcaaaacatcctgctgattttcgtggcgataggcatggtttcctggctggatatggctcgtattgtgcgtgggcaaaccctgagtctgaagcgcaaagagtttattgaggcggcacaagttggcggtgtaagcacaagcggcattgttattcgccacattgtgccgaatgtactcggtgtggtggtggtctacgcaagtcttctggtgcccagcatgatcctctttgaatctttccttagcttcctggggttgggtacgcaagagccgttaagcagctggggtgcattgctgagtgatggcgcgaacagcatggaagtctctccatggttattgttgttcccagcgggattcctcgtggtgacgctgttttgtttcaactttatcggcgatggcttgcgtgatgccctcgacccgaaagatcgttaaggagtgcagccatgagcgtaattgaaactgcaactgtgccgctcgcacaacaacaggctgacgcactgctgaacgtgaaagatttgcgtgtcacctttagtaccccggacggcgacgtcacggcggtcaatgatttgaatttttccctacgtgccggagaaacgctgggtattgtaggtgagtctggtagcggtaaaagccaaactgcatttgcgttgatgggcctgttggctgccaacggacgtattggcggaagcgcaaccttcaatgggcgtgaaatcctcaatttgccagagcatgaactcaataaactgcgcgctgaacaaatcagtatgatttttcaggacccaatgactagcttgaatccctatatgcgcgtcggtgagcagttgatggaagtgctgatgctgcataagaacatgagcaaagctgaggcgtttgaagagagcgtgcggatgctcgatgcggtaaaaatgccggaagcgcgtaaacgcatgaaaatgtacccgcacgaattttctggcggcatgcgtcagcgagtcatgattgcgatggccttgttatgtcgacctaagctgctgattgcggatgaaccaacaactgcgctggacgtcaccgtacaggcgcagatcatgacgctattaaatgaactgaagcgggaatttaataccgccatcattatgatcacccacgatcttgtcgtggtggcggggatctgcgacaaagtgctggtaatgtacgccgggcgcacgatggaatatggcaacgcgcgcgatgtcttttatcaacccgttcatccttattctatcggtttgctcaacgcggtgccgcgtctcgatgcggaaggtgaaacaatgttgaccatcccgggtaatccgccaaacctgctgcgattaccgaaaggttgcccgttccagccacgttgtccgcatgcgatggaaatttgtagtagcgcaccgccgctggaagagtttacgcctggccgtctgcgtgcttgctttaaaccggtggaggaactgttatgaatgctgtaactgaaggaagaaaagtcctccttgaaatcgccgatcttaaagtgcactttgaaatcaaagatggcaaacagtggttctggcaaccgccgaaaacgctcaaagccgtcgatggtgtcactcttcgcctgtatgaaggggaaacattaggtgtggtaggggaaagcggatgcggtaagtccacctttgctcgcgccatcatcggtttggtcaaggcgaccgacggtcatgttgcctggttaggtaaagagttgctgggcatgaaacccgatgaatggcgtgccgttcgcagtgatattcagatgattttccaggatccgttggcaagcctaaacccgcgtatgaccatcggcgagatcatcgctgaaccactgcgtacttatcatccgaaaatgagtcgccaggaagttcgcgagcgcgtgaaggcgatgatgctgaaagtcgggttattgcctaacctgattaaccgctatccgcatgagttctctggtgggcagtgccagcgtatcgggattgcgcgtgctcttattcttgaaccgaagctgattatctgtgatgagccggtgagcgcgctggacgtgagtattcaggcacaggtggtcaacctgctccagcaattgcaacgtgagatgggattgagtttaatttttatcgctcatgacctggccgtggtaaaacacatttccgatcgtgtgttggtgatgtatctcggccatgcggtagaactggggacctatgatgaggtctaccacaatccactacatccttacaccagggcattgatgagcgcagtccccatacctgatccggatctggagaagaacaaaaccatccagttactggaaggggaattaccgagcccgatcaacccgccttccggttgtgttttccgtacccgttgcccgattgccggtccagagtgcgccaaaacacgtcctgttctggaggggagtttcagacactccgtttcttgcctgaaagtcgatccgctttaaaaacaataagggctgacagttgtcagccctttttcacgctaaaagcgattatttattcccgccagatgatatggcaaagtttgtgatctttttcgcggcataacagaatgcgggcaaaaacatcgttgatttcaccatcttcactgtccgccagaccaatcaccacttcggcaaaaaagtccgggttcaaatcgaaatcaacatgttcctgccagtcttccgccggatcgaataactccgcgccgccgcgctcttcaaactgaagattgaacagcaggacatcagctggatcgagattgtcggcagccagttcgagaaaaatatcgtaggcctgttcaagcgtttcatcttcagtcaggcgattgtttagatccatatccatagttactacctgtttaacctctgttggcgacgttttacagcaacggactgaagaagtaaaacagtcgctcggcgacacgttgccataatggacgttttagccataaacgggcatcgagcagacgactacggctaatataatcgtcctgaacggcggcgaggtcagcaccaaaacctttatcgtcgattgccagggtaatctcgaaatttagccacagactacgcatatcaaggttaactgtgccaaccagacttagttcgccatcgaccagcacgctcttggtatgcagtaacccgccttcaaactgataaattttaaccccagcagccagcagttccgtaaagaatgcgcgactggcccagccgaccagcatgctgtcattttttcgcggaaggataatactgacatccaccccgcgctgcgccgccgtgcaaatcgcatgaagtaaatcatcgcttggcacaaagtagggcgtggtcatgatcaaatattcacgcgcgctataagccgcagtcaataatgcctggtgaatgagatcttccggaaagccggggccagaagcaattgtgtgaatggtgtgaccgctggcctgttcaaacggcataatattgacatctggtggtggcggcagaatacgttttccggtttcaatctcccagtcgcaggaataaataatccccatcgcggtggcgatagggccttccatacgcgccatcagatcaatccattgccctacgcccgcatcttgtttgaagtagcgaggatcgaccatattcatgctgccggtgtacgcgatgtaattatcgatcatgatcatcttgcgatgttggcgcaggtccatacggcgtaaaaacacacgcatcagattgacctttaaggcttcgaccacttcaataccggcattacgcattagctcgggccacgggctgcggaaaaaagccacactcccggcggagtcgagcatcaatcggcaatgaatgccgcgtcgcgcagccgccattaaactttcagccacctggtccgccatgccgccgggctgccagatataaaacaccatctcaatattatggcgcgcgagctggatgtcgcggattaacgcctgcatcacatcatcactctcggtcatcagttgtagctgattccctttgaccccagcgatcccctgacgacgctcgcaaagcttgaataatggcgcagcgacactgctattttcttcggcgaagatatgcttacaggctttaaggtcgttaagccattttgcggtggaaggccacatcgctctggcgcgctcagcgcggcgtttgcctaaatggagctcgccaacggcaagataggcaataattccgactaacggcagaatgtaaataatcaacagccaggccatcgcggagggaactgcgcgtcgtttcattagaatgcgtaaagttacgcctgcaatgagcaaccagtatcccagaatggccaaccaactcaccaacgtataaacggttgtcatagattagaaatccttttgaaagcgcattgttatgagtttacgcatatggattcatctggcaaataaaaacgcgggaaaagcactggtcagcgtcgggggtgggggtataatgaccattctgttattgcatagagtagttaacatgaagcggagtagaacggaagtggggcgctggcgcatgcagcgtcaggctagccgacgtaaatcgcgttggcttgaggggcaatcgcgccgaaatatgcgtatccacagcatcaggaagtgcattctaaacaaacagcgtaactcgttattgtttgcgatctacaatatctaaatgtactgggcaccattgcggtgcccaataagtttactcttccgtctttaaactttatttttgcgcgctttctttactgtcagctttcgtttctagttcatcgttatcgctgaaaataccatgaccactgttcaacaacatactaacgagcatatcattattaatctcttcaccatttaaaactcgcgccagaatttcgctgccaaacagttgcggactgagaatgatatccggatgtaccatcttaatcttattcaggtttttgctatcactgacggcgagaactgttttgacatcactgctcatatcttttgcgctgagtacaacaaacgcgttatctgcatcgttatcactcagcgccagaatggcccggcaacgatcgattcccgctttctttaatacagaactgtcattactgtcaccggggataacatcagcattatcgcctaagcgttgctcaagttgcttgatatcatcttcaggcaagttgctgataaccgttacgttttgtccgcgttgattcagttgcaggatcgtattgatggcgagaatgctatgtccgcaaacaataaaatgatctttacgatgcattgtatgattgtttccttttacaagtttgttgaatcccccgcggataagcggaccaaaaatactggtcatagatgtggcaaaaacggtaatgccggaaataatgacgctaatagtgaacaatcgtgcactttcagaaacagggacaatatcgccatagccgacggtactcatggtttctatgctaaaatagaacgcggtcatcaaactttctattcgcggattaaaaccttcgcttaaataaagcgcaccgtaggtactgtaaaacagtaatgtcgtgaaactaataaatgcaaaaattgtcccggctgcggcgctactgtgggagaagtctttgcgcagtatcagcaaaaacaccagcgtaaaaatgcaaaatccaatactaaatttcagccagggataaaaatgcagggtgtaaattagcgctatcaacaacaaaatgatactgattgcccatgcgagctttgcccggaacagtaagccaatggagttcaggacaagaaagacgccgagcataaagagtggggcgtttgccagcaaggagagatccaactcactaaatgctttgatatggaaaatatcaagcaaattgacgctcataccatagattgttttaaaaataagcaatccatttaaaaagacggccagcgcgagaatgtcgtgccgaagggtcacccataaatttgttgctgtttgtttgaatgtagcccagtgactcactgatacctctgtaaccacaattttgtttaattatcttagcgtgcacattttctgaacatacatgcagcgcgtgaatgtgttaaacaatagtagatgactttatccgcagtaatcaaaggatttgagcgagcaactgtacctcaggaaaggtcatttttcctgaatatgctcacatcatataaagaaatacagataaagttattatctgcttgtggtggtgaatgcactgaccggctataaggaaaggccaaacaagaacacggttgcaaaaaccgtgcccttaaatattgaatctctattcagaacactttcttaaatggtttcacactaacgtgttcatagactcctgccgctacgtacgggtcagcatcggcccaggcctgagctgcttccaggctttcaaattcagcaataacggtactgccagtaaatcccgcagcccctggatcgttactgtctaccgctggcattggaccagctgtcaacaaacgaccttcatcatgcagtaactgtaaacgtgctaaatgtgccggacgaacggaaaggcgtttttcgaggctatcagctttgtcttgagcgtaaataacatacaacacgggcacaactccttgttcgggaaagttgtaaagtacgttatttgaaagggcgaagatctgcaacggaaagatgatgtctttgttaaggccatgcataaagtaagggtaattacgccaaaaatgacattttcactgatcctgatcgtcttgccttattgaatatgattgctatttgcatttaaaatcgagacctggtttttctactgaaatgattatgacttcaatgacccttgatttacctcgccgcttcccctggccgacgttacttagcgtctgcattcatggtgctgttgtggcgggtctgctctataccagcgtacatcaggttattgaactacctgcgcctgcgcagccgatttctgtcacgatggttacgcctgctgatctcgaaccgccacaagccgttcagccgccaccggagccggtggtagagccagaaccggaacctgagccgatccccgaaccgccaaaagaagcaccggtggtcattgaaaagccgaagccgaaacctaagccaaaaccgaagccggtgaaaaaggtacaggagcagccaaaacgcgatgtcaaacccgtagagagccgtccggcaagtccgtttgaaaatacggcaccggcacgcctgacaagtagtacagcaacggctgcaaccagcaagccggttaccagtgtggctagtggaccacgcgcattaagccgtaatcagccgcagtatccggcacgagcacaggcattgcgcattgaagggcaggttaaagttaaatttgacgttacgccggatggtcgcgtggataacgtacaaatcctcagtgccaagcctgcgaacatgtttgagcgtgaggtgaaaaatgcgatgcgcagatggcgttatgagccgggtaagccaggcagtgggattgtggtgaatatcctgtttaaaattaacggcaccaccgaaattcagtaagcagaaagtcaaaagcctccgaccggaggcttttgactattactcaacaggtaaggcgcgaggttttccttcaggatcaaccgcgacatacttaaataatgcttctgtcgctttatagcgttgcccaattggttcagacgctacttttttcacccacacttcaatattaatgctgacgcttgtcgtccctttctggacacagcgtgcatagcagcacaccacatcgccgaccgcaaccggccgtaagaaagtcattccttcaacccgcacagtcactacgcgaccgtgggcaatttcttttgccagaatagcgccgccaatatccatttgactcattaaccaaccaccaaagatgtcaccattggcattggtatcggcgggcatggctaaagtacgtaaaacaagatcgccctgagggacgttatgtgttgtagacatggtaaaaccgacttaaaaggaaaatcacaggcgcgatgctactatgattttcctgaggagaacagaggagatacagcgccagccccgaaggactggcagtctggttaggatttatcttcctgcggcatgtggcggtagatatagataccgcttaacaatgtgaagattaaggtaagggcggtcaggccaaagactttaaagttgacccaaatattttgcggcagccagaatgcgatgtagatgtttgccagaccgcaaaggataaagaaaacagcccaggccagattcagcttgctccataccggttgcggcagcgtgagttctttacccagcatccgctgaattagcggctttttcatcacccattggctgactaacagggctcccgcaaatagagcataaatgacagtaaccttccatttaataaactcatcattgtggaagaacagcgtcaagccaccgaagacgaccaccagaacaaaagtgatcagggccatcttctcaaccttacgaaagcgaacccagctatagataagcacaatcgccgtggcgacgatcagcgccgcagtagccgcatagatgtcataaatcttgtaaaacgcgaaaaagacaaccagcggtaaaaaatcaagaaactgcttcattttacgattccgtaatcaaatgcttaaggttattggcgaatcaacatatacaggcggaacagatagatgagcaatatggcactaatcaggttgctcaaggtgttcgccagtacggcaccaatttccggggttaatgcggcaaaagaagaggcaaaaagcagcaacagtgtttttgccagcaaccagctcagtactgcgggtgccaccagacgcatattcgcccaagtcagccgcatactgctacgcatgctggcaaaaacgcccattttgtcctgtaccaacatcaccggtgccagggccagtaaaatggccatgataattcccggaacgaccaccagcatgatgccaatctgtactaaaagggtagtcagaaaaatcagaataaataactttggcaatatcggcgcactggcaccaatagctcgcagcgcactgactctctgacccgcagacaccagctggataattaatattacgcctccggcgagaatggcgttaccgattaatccactaaaagtggacgccgcactagcctgcagcaaaatttgttgctgttccggactcatattctgaaccaggtcgaacaacccactactgccgctaacgggcacgccgtcattgagctgcgcaagctgtgcatcactgggactgaaaacatgccctaacaccactgtgataaacgcacatagcaagcttaccaacagaatggtcataaattgattacggaagaaatttccggtgtcacggtatacggactgcgccgtgatagacatgcactctccttgagttttatgcaggtgttaattagcgggcaattgtaccctggttaagcctcgggtggcagcatcaggtcttgtatggaaaagcatatctttgtaaagcggaggtaattgctggccttcaggcatgggcaaatcgcggcaagtggcgaccgagttaatatttgcgtagcgaaaatatttaaaaattgatttaaatcacattaaccaggattctcaatgcaacttctaaattaatccagatcaataaagggtgaattatcatatgtaatgtgatctatgtaggatcatttgttactccaatgtaggtatattcgtcacgtttttataaccataacgacggagcggatatgaaaaagttaacagtggcggctttggcagtaacaactcttctctctggcagtgcctttgcgcatgaagcaggcgaattttttatgcgtgcaggttctgcaaccgtacgtccaacagaaggtgctggtggtacgttaggaagtctgggtggattcagcgtgaccaataacacgcaactgggccttacgtttacttatatggcgaccgacaacattggtgtggaattactggcagcgacgccgttccgccataaaatcggcacccgggcgaccggcgatattgcaaccgttcatcatctgccaccaacactgatggcgcagtggtattttggtgatgccagcagcaaattccgtccttacgttggggcaggtattaactacaccaccttctttgataatggatttaacgatcatggcaaagaggcagggctttccgatctcagtctgaaagattcctggggagctgccgggcaggtgggggttgattatctgattaaccgtgactggttggttaacatgagtgtgtggtacatggatatcgataccaccgccaattataagctgggcggtgcacagcaacacgatagcgtacgcctcgatccgtgggtgtttatgttcagtgcaggatatcgtttttaattccgcacaaaaacgaccccgtaatatacggggtcaataaggacatggtataaagggtattatttcttcgcttctacgccatcagtttcagagcgaattaaaaatttctcagttgtttgcggaatattctgaatcagccagtcggccatttgcttttcctcatttaaaatcgcttcgatggttggaatactagctgtatcaccggcattttttgctgctgctaatagactggtgtaacaggcgatttcaaattgctcgaagacatatccgctaatagagcctttgactatttcatcagaagggaatataccaccgatactctgcccaagcgcagccattttactcatggaatctttaatgacactacgactaatgtcattacgatcaagaatagtttccagttgaacaatctggtttttggtttcactaagatgttgttcaatacgagcgcgtagttcaggataattatctatacggctggccatggattcaagcatagattcggcttgcttttccattgcgtgggcgtcacgtaaccagtcatgataatgttcaatacgattcatgaaaatgtcctctttataaaatgactaaaagttaaaattcatatttcaggctttattttcggctttcttatttacgttattaatggccagatcagtcagtttgatgtcggtggccttttcttcttccagggtttctttcagaagcttcgctgctttacggtaacctaattgttcagccagcgtcgctaatgtcccgtaactggcaatctcataatgctcgactttctgtgctgcggcaatcagtgcggcatcacgcacttcgtttttctcggtactttcgatgacctcattagcttcttcaataagaccttccattgccacacatttcatgcgcttaattttcaggttgctttcggactccacaacttgatcaatacgttcaatctgtccatgagtttcctcgaggtgcgcatgaaaagcctgacttaatttttcattacttgttgctcttgcgagttttgccagtgcccgggttaattgtttttctgcgctgtaggtatcactaagcaggtgaataaatacatcttcaatggtcttcatattcatatttttctccagtgaaatcactgcgagccatacggcccgcagatgcaattatctttatcagctgatattaataattaacggtgaatcaggatttgccacttttattaccaccgctttgttgaccgccttttttacccgcttcagatgcgcgttgcggatcatttttaaaattaccgccgctatgctgaccgcctttacggcctgcgtcggatgccttctcacggtcttcggcgaaatttccactaccaccacgatgttcggccatgttatttctcccgttgcgttgcattgtttcattaatatgagtgttgtgtgtcgacactcattaaaattagtcgctaatgagaattagtcaaattaagcgcaacgagaagatagagggaaaatatattttgaggaacattctggatatattaacaattacctgaggaataagtgacttagagaaaattattgattttactggtgttatgttgcgggattaatttgtttgattatattactgttgggcggaaaaatgacgtaagttgacgttcgaccggggtaagcgaaacggtaaaaagataaatattaaatgaatttaggatttttccggcttcattaaagaaagttaaaatgccgccagcggaactggcggctgtgggattaactgcgcgtcgccgctttcatcggttgtacaaaaactttcagtgccgccagcattttctctggctcattaatatgttgctcgatgattttaacaatggcgctaccagaaatcgcgcccgcagctcctgcatcaatcgctgcttttacctgatccggggcggaaataccaaatccctgcaatggaggtgcagcgttgtactctttcagcttcgcaaccagatgattgaggggtaacgcggcgcggttttctgcgccggtcacgcctgctcgactcagcaaataggtgtaaccacgaccgtaagaggctatctggcgcagcaggtcgtcatcggcatttggcgggcagatgaagataggtgcgacattatgacgcaacgcggcctggcggaagggcgcggactcttcaactggcacatcggcaaccagcacgctatcgacgccgactttttcgcactgggcataaaactcatcaatgcctttgttaaacaccagattggcatacatcaacaggccaatgggaatggtcgggtgtttctggcgaatcagtgccagcatttcaaaacattgtgccggagtcacacctgccgcaaaggcgcgcagagtggcgttttgaatcgtcgggccatccgccagtgggtcggagaaggggatacctaactccagcgcgtcagcaccggcttcaattagcgtatcgataattttcaaactctgctcaatgcccggatcaccgagcgtgacgaaaggaacgaatgcgccttctttgcgctccttcaactgggcaaacagagattcgtagcgttccatcagatttcccctcgtgctttcaaaatatcgtgaacggtgaagatgtctttatcgccgcgaccggaaaggttaaccaccagtagctgctctttatccgggttttcgcgcatcattttcaacgcatgggccagggcgtgggaggattccagcgccgggatgatcccttcgtgcaggcacagcgttttgaaggcttcaagggcttcatcatcggtaatagacacgtaatcagcgcgtccagtgctgttaagatacgcgtgttgtgggccgacagacgggaaatccagtccggcggagatggagtaagattcttcaatctgcccgtcttcggtttgcatcatcggcgctttcataccgaaatagatacccacgcgaccatgttttagcggtgcgccgtgctcgccagtttcgataccgtgaccacctggctccacaccaatcaggccgacgttggtttcattgatgaaatcagcaaacatgccgatggcattgctaccgccgccaacacaggcgataacggcatccggcaggcgaccttctctttccagaatctgcgctttggtttcttcgccaatcatccgctgaaactcacgcacaatggtcggataaggatgcgggccagctgcggtgcccagcatatagtgcgcggtttcgtaactaccggaccagtcgcgcagcgcctcgttacaggcatctttcagcgtcgcggaaccgctatgcaccgggatcacttccgcacccattaagcgcatacgaaaaacgttagggctctggcgttcaacgtctttggcacccatataaatacggcatttcaggccgagcagggcgctggcaagggcgctcgccacgccatgctgaccggcaccggtttcggcgatgatttcggttttacccatccgcttcgccagcaacgcctgccccagcacctggttagttttatgcgcgccgccgtgcagcaaatcttcacgcttgagatacagcgtggtgttcgtcccggctgtaatgttctggcatttggtcagcgcggttggacgcccggcatagtttttcagcaggtcgttgaactgagcctgaaattcaggatctttttgcgcactgacaaaagcttcttccagctggcgcagagcaggcatcaggatttgtggcacgtacatgccgccaaactcaccaaaataggggttaagtaatgttgtcattgttcctttccttaatatgcgcgcagcgtctggaaaacgctggccaaaagacgtgcgtctttgatgcccggttggctctctacagcagaattaaaatcaagtccggcgcagccggtttgtgccgcttccacgcagttatctgcgcctaagccccccgccagcagaacgttgccaaggctttgaccatttaatagactccagtcaaaacgttgcccgcttccaccctggccgttgtctaaaacatatttatcaacgtgctgaaactcgcgggcgggcagggtttcaccgacgcttaatgctttccagatggcaacatgtgctggcagagcttcacgcagcgtatcgatatacagctgttcttcattaccatgcagttgcactgccgccaggcttaacaccttagctttgtccaccacatcggcaatatcgtgattgcggaacacgccaacatactgcaacggtgccgcagccatcacttcctgcgcctgttcaacgttgacgcaacgcggacttgtcgcaacaaaaatcaacccaccgtaaatcgcgcccgcgtcataagctgctttagcatcttgcccacgcgtcaggccacatactttattctcacccagcaacacccggcgcacggcggcgtgcaaatcgtcatgggccatcaacgcgctaccaatcagaaaaccgttagcgaagtggcttaactcgcgcacctgagcgtaagtattgatgccggattcgctgattaccgtcacgttgtgccccagtttcggcgcaagctcgcgggtacggttgagatcaatgctcaaatcacgcagatcgcggttgttgatgccaacgacctttgctcccaatgcaatggcgcgctcctgttcctcttcattactgacttcggtcagcacccccatctccagactgtgagcgacggcggcaagctggcgatattggtcgtcatccagtacactaagcattaataagcaggcatcggcctggtaatagcgcgccagatagatctggtaagggtcgataatgaagtctttacataaaatcggctgcggggcgatttggctgacgatggggaggaaattaaagctcccctgaaaatatttctcatcagtcagcacgctaattgcgctagcgtaatgtttataaatggcggcaatgcgtgctggatcgaaatcatcacggatcacgcctttactcgggctcgctttcttgcactccagaataaacgccgtgcgcgcaccctgtagcgcatcataaaaatgtcgcgtgctcggctgaacctcattctgaaaactggccagcggttgctgctgtttgcgggcttctacccaaatcgccttgtctgcgacgattttcgctaaaacggtttgcatcatttaccctcgtgccgccagtgcggtgactctgtcgtaagcggaaccactgcgcagtacctcaagaacggtttgcgcattggcttgcagatcttcatggccatgcaggcgcattaacatggcgacgttcgcagcgacggctgcttcatgggcggcgtcgcctttaccttgtaacaaacgtgttaaaatgtcacggttttcttccggtgttccgcctgccagttgctcctggtggtagggtgtcaggccaaagtcttctgcggtgagctgatagcttttaatttcgccgtcatgcagttcggcaacgattgtcggcgcgtgtaaactaacttcatccatcccgccgctgtgcaccaccgccgcgcgttgataccccagcacgcgcaaggtttcggcaatcggcagcaccagttccggactataaacaccaattaacgccagcggcggatgcgccgggttaatcaatggccccagcacattgaacagggtgcgggttttcagttgctggcgaaccggcatcgcgtggcggaatccggtgtgatacttcggcgcaaagaggaaacatacacctaactcatccagcgcctggcggcttttatcggcgttcatatcaagattaataccgaacgccgccagcagatcggagctaccagatttactggagacgctacggttgccgtgtttcgccactttcagcccacaggccgcggcgacaaacgcactggcggtagaaatattgatactgttgctgccgtcaccgccagtaccgacgatatcagcaaacagataatccgggcgcgggaacggcgctgcgttttccagtagcgcggttgctgccccggcgatctcgttcgggtgctcaccgcgaattttcatgctcaccagcgccgccgccagttgttccggcttcagctcgccacgcaccaccgcactaaacagctggtggctttcttgttggctaagcgtctgcgcctgatacagtttttccagaatcggttgcagcgtgttggctggctctagtttctgctgcgcccaggccagcgtttgttccagcaggcgagcgccctgggtggtgagaatggattccggatggaactggaatccacaaacgcgatccgcatcgtgacgtactgccatcaccatgccattaaaatgggcgttgatggttaaaccggccggaatgttactgccaaccaggctgtgataacgcgccaccggcagcgggtttgttaatccggcaaacatcgcctgaccgtcatgttcaatgctggaggctttaccgtggagaatttcgcccgcctgaccgacatagcccccgtaagcttcgacaatcgcctgatgtccgaggcaaatgccaataatgggcagcttgccacgcaagcgggtgaggagttccggcatacaaccggcttcgctcggcacaccggggccaggagaaagcatcagcaccggattgctcatggtcgccaggcgttcaattaaggtttgcgccggaatatggttgcggtaaatcaccacgttatgcccattgctgcgcaactgatctgccaggttgtacgtaaaagagtcgatattatcgagcagcagaatgtcagccatcagaaagtctcctgtgcatgatgcgcggtggcaatagcgcgcagtacagcgcgggctttgttacgggtttcgtcggcttcgctctgcggaacagaatcaaggactacaccagcacccgcttgcacggtggcgataccgttttccaccagcgcgctgcggatcacaatgcaggtgtcgagatcgccatgcgcggtgaaataacctaccgcgccgccgtagctgccgcggcgacgaccttccgcctcggcaattaactgcatagcgcgtactttcggcgcaccgcttaacgtccccatattcatacaggcgcgataagcgtgcagggcgtcaagatcgtgacgcagttcgccgactacgcgagagacgaggtgcatcacataggaataacggtcaactttggtgagatcggcgacgtagcggctgccgggggtgcaaatgcgtgccagatcattacgggcgagatcaaccagcatcagatgttcagacagctctttatgatcggtacgcatttccagttcaatacggctgtcgagatctctgtccagactaccatcggcgcgacgaccgcgtgggcgtgttccggcaatcgggtagatctcaatctggcggctggtggcatcatacttgaggctgctttccgggctcgcgccaaatagggtgaaatcattatcctgcataaaaaacatgtacgggctgggattactctttttcagcacgtaataggccgccagcggactcgggcagggcagagagaaacggcgagatggcaccacctggaaaatttctccagcgcgaatcgctttttgcaacaaacgcactacgccaccgaactcttcatcgctctgattacattcacaacgcatatgcggcacggaaaccactggcagcggcggcgcggcttcggtcagttgctgacgtagttcgttcaggcgagcagtgagacgttgtttttcttcttcattcggagcaaacaggctggcctgaatacgggtgctttttttctgatggtcaatcaccatcagcgtttcagcgagataaaaacagaaatcagggcagttattttccgcactcagttgcggtaaatcttcaaatcccgccacaaggtcataagagaacaggccgccgaagaacatggcttctcgttcttccttcggtacattcaacagattctgcaataaacggaaagcgtcaaaaacgctaagggagcataagcgggcgtcttcatccagcagtggactgacaggggggaagcgcagcacacggcagtttggactttgttcactttccacacccgcaggcagggcgttatccagtagtgccaggagggcttcgccgttgccggaaagtgcctggattgtgacagtgtcacctaaagctgtaatgcgcagcgcactgtctaccagcagcaggctttttaaatcatctttgctgtcgatatctgcggattccagcagcagcgttgccggacgatccccacacaactggtgaaaaagcgcggtgggattgtcgcgataagcgccttcgcaggttagcagttcgagagtcggtttttgtgtttgcattgttattctctaattttgttcaaaaaaaagcccgctcattaggcgggctgggtatctgattgctttacgcatggtgaatacactgcccgtttcaggaagtgcgccaccaacctttcagtacgaaaattgctttcattgtcgataccctttttacgtgaacttgcgtactagttaactagttcgatgattaattgtcaacagctcatttcagaatatttgccagaaccgttatgatgtcggcgcaaaaaacattatccagaacgggagtgcgccttgagcgacacgaattatgcagtgatttacgacctgcacagccataccacagcttccgatggctgcctgacgccagaagcattggtgcaccgtgcagtcgagatgcgcgtcggcaccctggcgatcaccgaccatgacaccacagctgcaatcgcgccagcaagagaggaaattagtcgtagcggactggcgttgaatcttattcccggcgtggaaatttccacggtctgggaaaatcatgaaattcatattgtcgggctgaatattgatattactcatccgctaatgtgtgagttcctcgcgcagcagacagaacggcgcaatcagcgggcgcagctgattgccgaaagacttgaaaaagcgcaaatacctggggcgctggaaggcgcacaacgactggcgcagggcggcgcagtgacgcgcggtcattttgcgcgtttccttgttgagtgcggcaaagccagtagtatggcggatgtctttaaaaagtatctggcgcgcgggaaaaccggatacgttccgccacagtggtgtacaatagaacaagctattgatgtcattcatcattctggcggtaaggcggtgctagctcatcctgggcggtacaatcttagtgctaaatggctgaaaagattggttgcgcattttgccgaacaccacggtgacgcgatggaagtcgcgcagtgccagcaaagccccaatgaacgtacccagctggcggcccttgcgcgtcagcatcatttatgggcaagtcaaggatctgattttcatcagccatgcccgtggatcgaactgggtcgtaaactctggctgcccgcaggcgttgaaggcgtctggcagctatgggaacagccgcagaacaccacagagagggaattatgagccagtttttttatattcatcctgataacccacagcaacgtctgatcaaccaggcggtggagatcgtgcgtaaaggcggggtgattgtttatccaactgattccggctatgcgctcggctgtaaaattgaagataaaaacgcgatggagcgtatttgtcgtattcgccagctgccggacggtcacaactttaccctgatgtgtcgcgatctttctgaactcagcacctatagttttgttgataacgttgcgtttcgtttaatgaaaaacaacacgccgggcaactataccttcatcctgaaggggacgaaggaagtgccacgccgtctgttgcaggaaaaacgcaaaaccatcggtatgcgtgtgccttctaaccctatcgctcaggcgttacttgaagcattgggcgaaccgatgctttccactagcctaatgctgccaggcagcgaatttaccgaaagcgacccggaagaaattaaagatcgtctggaaaaacaggtagatttgattattcacggcggctatctcgggcagaaaccgacaacggttattgatcttaccgatgatacgccggtcgtggtgcgtgaaggcgtaggtgatgtgaagcctttcttataacaaattgcgttccacggatggaagactatggcagggaagtttcgctgcattttgctgttgatagcagggctgtttgtaagttctctaagttatgcagaaaacacggagatcccttcttatgaagaagggatcagcctctttgatgttgaagccactctgcaaccagatggggtgctcgacatcaaagaaaatattcattttcaggcgcgaaatcagcagattaagcacggcttttatcgtgatttaccacgactatggatgcagcctgatggggacgctgcactgctgaactatcatattgttggcgtcacccgtgatggtattcctgaaccctggcatcttgactggcatatcgggttaatgagtattgtcgtgggcgataaacaacgtttcttgcctcaaggcgactatcattatcaaattcattatcaggttaaaaatgctttcctgcgtgagggggattctgatctgctaatctggaacgtgaccggtaaccactggccgtttgaaatttataagacccgtttttctctccagttctctaatattgcgggtaatccatttagcgaaatcgatctttttaccggagaagagggcgacacatatcgtaatggccgcatccttgaggacggaagaattgaatcccgcgatccgttttatcgtgaagatttcacggtcctctaccgctggcctcacgctttacttagcaatgccagcgctccgcaaacgacgaatattttcagccatcttcttttaccctccacgagtagcttgttaatttggtttccgtgtctgttcctggtttgtggatggttatatctctggaagcgcaggccgcaatttacgccggtagatgtgattgaaaccgatgtcattccgccagattacacgcccggcatgttacgtctcgatgcgaagctagtttacgacgataaaggtttttgtgccgatatcgtaaatctgattgtgaaaggaaaaattcatctggaagatcagtctgacaagaaccagcaaatcctgattcgtgttaatgaaggcgcgaccagaaataatgcggtattactgcccgcagagcagttattactggaagcgttatttcgtaaaggcgataaggtcgttcttacggggagacgcaacagagtcttacgcagggcatttttacggatgcagaaattttatctgccgcgtaaaaagtctagcttttaccggtctgatacttttttgcaatggggtggactggcaatattggcggtcattctttacggtaacttgagtcctgtaggctgggcaggaatgagtctggtgggcgatatgtttattatgatctgctggattattccttttttattttgttcccttgagcttttgtttgcccgcgatgatgacaagccttgcgttaatcgtgtaatcatcactttgtttttaccactgatttgtagtggcgtggccttctattctctctacatcaatgtcggagatgtattcttttactggtatatgccagcgggttattttaccgctgtttgcctgaccggttatctcactggcatggggtatatttttctgccaaagtttacccaaactggacagcaacgttatgcccacggtgaagctatcgttaactatcttgcgcgtaaagaggcagcaacacacagtggacgtcggcggaaaggggaaacacggaaactggattacgcgttgctaggttgggctataagcgcaaatttggggagggaatgggcgttacgcattgcccctagcctttctagcgcgattcgcgctccagagattgcccgtaacggcgttttattcagtttacagacgcacctaagttgcggggccaataccagtttgttggggcgaagttattccggtggtggtgctggcggcggcgcgggtggcggaggcggtggtggctggtaattaagctgatgttaatcgaaacaagctttaaccataaagatagtgtagtatgttgcgcctcaaagccaggccgataaacgtcgagtcgtttacttaaggcctgaagagttcaaacagactttactatcagtgagtcagatgtaagttctgactcactgttgcacaaaagcatatcagacgcctgggaaggcgacaccaaaaggaagctctatgagcgaaaagctacagaaagtgctggcgcgtgccggccacggttctcgccgtgaaatcgaatctattattgaagccggtcgtgtgagtgttgatggcaaaattgctaaactcggcgatcgtgttgaagttacccctggattgaaaatccgtatcgatggtcacctgattagcgtacgtgagtccgctgaacaaatttgtcgcgttctggcctattacaaaccggaaggtgagttgtgtacccgtaacgatccggaaggacgtccaacggtgtttgaccgtctgccaaaactgcgtggcgcacgctggattgccgtgggtcgcttggacgttaatacctgtggtctgctgctgttcaccaccgatggtgaactggcaaaccgtttaatgcacccaagccgtgaagttgaacgtgaatatgccgtgcgtgtatttggtcaggttgacgacgcgaaactgcgtgatttgagtcgtggcgtgcagttggaagatggtccggcagcttttaaaaccatcaagttcagcggcggcgaagggatcaaccagtggtacaacgtgactctgaccgaaggccgtaaccgtgaagttcgtcgtctgtgggaagcggttggtgtgcaggtgagccgcctgatccgtgttcgttacggtgatatcccactgccaaaaggtctgccacgcggtggctggacggagctggacctcgcccagactaactatctgcgcgaactggtggagctaccgccagaaaccagctctaaagtcgctgtagaaaaagaccgtcgtcgcatgaaggcgaatcagattcgtcgtgcggtgaaacgtcacagtcaggtgagcggcggtcgtcgttctggcggacgtaataataacggttaatcaaagtatgccggacgtcatatccggcatttttacagattaataatcgatccctatctgcgcttttacaccggcatcaaacgcatgtttgacggggcgtaattcacttaccgtatctgccagttcaagaatatcccgatgacaaccacgacccgtgataatcaccgtctgttgatgtggacgttcatttaacgcctgcaccacttcttccagtggcaaatagtcatacgccaccatatacgtcagttcatcaagcaaaaccatatccagactggaatcagcaagcatccgctttgcatgttgccagacttcgcggcaggcggcggtatcagactcgcggttttgtgtatcccaggtaaagcccgttgccatcacctgaaactcaacgccatgtggctccagcagattgcgttcgccattaggccaggtgcctttaataaactgcacgacgcctactttttttccgtgaccaactgcgcgtgttgccgtaccaaatgccgcggtggttttgccttttccattgccggtaaagacgatgataataccgcgttcatcctgggcctgggccacacgagcatctactttttctttcactcgctgctgacgctgttggtagcgttcatcactcattgggaaattcctggtttacggcccggttgggcgtcaaaggtcatgccggttttacggcggctgtcatcgcccatcagccagaggtagagcggcatgatatcagcgggtgttttaagtttctgtggatcttcggtcgggaaggcgctggcacgcattgcggtgcgcgtaccgcctgggttaatgcagttgacacgcaggcgctgctgatattcatcggccagtacctgcatcatcccttcggtggcaaatttgctcgctgcatatgcaccccagttggctcgtccctgacgtccaacgctactactagtaaagaccagactaccggcgtcgcttttgagtaataaaggaagcagtgcctgggtgagcataaaggtggcattaacgttgacctgcatgacgtcctgccagacctgcggattttgttcgctcattgggcaaacatcgccgagcaatccggcattatgcaaaacaccatccagacgcggataattaacggcaatgcgctgtgccagttgttggcaattttcggacgtgcaggtcagcaaatcgagaataaaccactgtggctgacgcccagtttcttcgtttatgtggctggctacctgacgtaatttttcttcattacggcccaacagaatcactgtcgcaccatagcgtgcatacgtcatcgcggcttcacgaccaataccatcgctggctcccgtcaccaggataatgcgatcattgagtaaatcttgttttggctggtaatgcatggctactcctcaacgacgttgtctgtcgcgctgccagtgtactttatgactttggggctttatgcctgaaacagaagggcatttcaatcagcctggggcgataacaccgcaaaatggatactttgtcatactttcgctgcaataacatctctgcgagacggcttaacatgcctgttgtaaactgtgagccaaagcgttgtttaaccaaggtggggactcgtggaattgttgtctgaatatggtttgtttttggcgaaaatcgttaccgttgtgctagcgattgcggcgattgccgccattattgtcaatgttgctcaacgtaataaacgccagcgtggcgagttacgggtcaacaatctcagcgaacagtataaggagatgaaagaagaactggccgcggcgctgatggacagtcatcagcaaaaacagtggcacaaagcgcagaagaaaaagcataagcaagaagcgaaagcagcaaaagcgaaagccaaactgggcgaggtggcaactgacagtaaaccccgcgtctgggtgctggattttaaaggcagcatggacgcccatgaagtgaacagcctacgtgaagagataacggctgtactcgcagcattcaaaccgcaggatcaggttgtgctccgtctggaaagccctggtggcatggtgcatggttacgggctggcggctagccaactgcagcgtctgcgcgataaaaacattcctttaactgttacggtagacaaagtcgctgccagcggcggttacatgatggcctgtgtggcggacaaaattgtttccgcaccgtttgctattgtgggttccattggcgtggtggcgcaaatgcccaactttaaccgcttcctgaaaagcaaagatattgatatcgaactgcacactgccgggcagtataagcgcacgctgacgttgctgggtgaaaataccgaagaagggcgggagaaattccgcgaagagttgaacgaaacgcatcagttgtttaaagattttgtgaagcgtatgcgtccttctctggatattgaacaggtggcaacgggtgaacactggtacggacaacaggcggtagagaaaggcctggttgatgaaatcaacaccagtgatgaagttattcttagcctgatggaaggccgtgaagtggtcaatgtacgctatatgcagcgtaaacgactcattgaccgattcaccggcagcgcggcagagagcgccgatcgattgttgctacgctggtggcagcggggtcaaaagccattgatgtaaaagacaaacgcgaggctaagacctcgcgttttgctttaatcaaccagatgatatttttcactaagcacatgggccaggtgtttgaacatattaaacaccgcggtgcttttggctgttggcaatccttgttcatctaaaaagtagtcgccggtaaataccagcacgccattacgctgcgtgacgccggtggcttcaatccctgcgagcgtatcctcatgctcacgaatgattttgttggcctctttcaacagcgtttcgcggtcgatgggttgtgtctctttgttcattatttactccttaaacaaggacattagtctacgccaggcatggcttgcagacaaatataccacgctggtggcaagagcgccttactggcaactttggattttgcatgctaataaagttgcgtatcggattttatcaggtacagtgtgacgctttcgtcaatctggcaatagatttgcttgacattcgaccaaaattccgtcgtgctatagcgcctgtaggccaagacctgttaactcagtcacctgaattttcgtgaacagagtcacgacaaggggttgatatccgcagagagcgagtccatatcggtaactcgttgccagtggaaggtttatcaacgtgcgacgcattcctggaagaatcaaattaggtaaggtgaatatgggtaaagctcttgtcatcgttgagtccccggcaaaagccaaaacgatcaacaagtatctgggtagtgactacgtggtgaaatccagcgtcggtcacatccgcgatttgccgaccagtggcagtgctgccaaaaagagtgccgactctacctccaccaagacggctaaaaagcctaaaaaggatgaacgtggcgctctcgtcaaccgtatgggggttgacccgtggcacaattgggaggcgcactatgaagtgttgcctggtaaagagaaggtcgtctctgaactgaaacaactggctgaaaaagccgaccacatctatctcgcaaccgaccttgaccgcgaaggggaagccattgcatggcacctgcgggaagtgattgggggtgatgatgcgcgctatagccgagtggtgtttaacgaaattactaaaaacgcgatccgccaggcatttaacaaaccgggtgagctgaatattgatcgtgttaatgcccagcaggcgcgtcgctttatggaccgcgtggtggggtatatggttagcccgctgctatggaaaaagatcgctcgtggcctgtctgccggtcgtgtgcagagcgtggcggttcgcctggtggtcgagcgtgagcgtgaaattaaagcgttcgtgccggaagagttctgggaagtcgatgccagcacgaccacgccatctggtgaagcgttggcgttacaggtgactcatcagaacgacaaaccgttccgtccggtcaacaaagaacaaactcaggctgcggtaagtctgctggaaaaagcgcgctacagcgtgctggaacgtgaagacaaaccgacaaccagtaaacctggcgctccttttattacctctacgctgcaacaagctgccagcacccgtcttggatttggcgtgaaaaaaaccatgatgatggcgcagcgtttgtatgaagcaggctatatcacttacatgcgtaccgactccactaacctgagtcaggacgcggtaaatatggttcgcggttatatcagcgataattttggtaagaaatatctgccggaaagtccgaatcagtacgccagcaaagaaaacagtcaggaagcgcacgaagcgattcgtccttctgacgtcaatgtgatggcggaaagcctgaaggatatggaagcagatgcgcagaaactgtaccagttaatctggcgtcagttcgttgcctgccagatgaccccagcgaaatatgactccacgacgctgaccgttggtgcgggcgatttccgcctgaaagcacgcggtcgtattttgcgttttgatggctggacaaaagtgatgcctgcgttgcgtaaaggcgatgaagatcgcatcttaccagcagttaataaaggcgatgctctgacgctcgttgaacttacaccagcccagcactttaccaagccgccagcccgtttcagtgaagcaagcctggttgaagagctggaaaaacgcggtatcggtcgtccgtctacctatgcgagcatcattagcaccattcaggatcgtggctacgtgcgagtagaaaatcgtcgtttctatgcggaaaaaatgggcgaaatcgtcaccgatcgccttgaagaaaatttccgcgagttaatgaactacgactttaccgcgcagatggaaaacagcctcgaccaggtggcaaatcacgaagcagagtggaaagctgtactggatcacttcttcagcgatttcacccagcagttagataaagctgaaaaagatccggaagagggtggtatgcgcccgaaccagatggttctgaccagcattgactgcccgacttgtggtcgcaaaatggggattcgcacagcgagcaccggggtattccttggctgttctggctatgcgctgccgccgaaagagcgttgcaaaaccaccattaacctggtgccggaaaacgaagtgctgaacgtgctggaaggcgaagatgctgaaaccaacgcgctgcgcgcaaaacgtcgttgcccgaaatgcggcacggcgatggacagctatctcatcgatccgaaacgtaagttgcatgtctgtggtaataacccaacctgcgacggttacgagatcgaagagggcgaattccgcattaaaggttatgacggcccgatcgttgagtgtgaaaaatgtggctctgaaatgcacctgaaaatggggcgtttcggtaaatacatggcctgcaccaacgaagagtgtaaaaacacacgtaagattttacgtaacggcgaagtggcaccaccgaaagaagatccggtgccattacctgagctgccgtgcgaaaaaagtgatgcttatttcgtgctgcgtgacggtgctgccggtgtgttcctggctgccaacactttcccgaaaagccgtgaaacgcgtgcgccactggtggaagagctttatcgcttccgcgaccgtctgccggaaaaactgcgttatctggccgatgcgccacagcaggatccggaaggtaataagaccatggttcgctttagccgtaaaaccaaacagcaatatgtctctagcgaaaaagacggaaaggcgactggctggagtgcattttatgttgatggcaaatgggttgaaggaaaaaaataacctttaattctgtcaggtttttataaacaaagggtcgcgaaagcggcccttttttattgcatattattttttcttcacacctatacactaaggctataaatgatatagtggttatagttagcaccttttttattattaaatcgtattagtcacccgccaggtgtgacgaaaaaacgatgttctgatggcgtctaagtggatggtttaacatgaaattacaacaacttcgctatattgttgaggtggtcaatcataacctgaatgtcagtagtacagcggaaggactttacacaagtcaacccgggatcagtaaacaagtcagaatgctggaagacgagctaggcattcaaattttttcccgaagcggcaagcacctgacgcaggtaacgccagcagggcaagaaataattcgtatcgctcgcgaagtcctgagcaaagtcgatgccataaaaagcgttgccggagagcacacctggccggataaaggtagtctgtatatcgccaccacgcatacccaggcacgctacgcattaccaaacgtcatcaaaggctttattgagcgttatcctcgcgtttctttgcatatgcaccagggcagcccgacacaaattgctgatgccgtctctaaaggcaatgctgatttcgctatcgccacagaagcgctgcatctgtatgaagatttagtgatgttaccgtgctaccactggaatcgggctattgtagtcactccggatcacccgctggcaggcaaaaaagccattaccattgaagaactggcgcaatatccgttggtgacatataccttcggctttaccggacgtagtgaactggatactgcctttaatcgcgcagggttaacgccgcgtatcgttttcacggcaacggatgctgacgtcattaaaacttacgtccggttagggctgggggtaggggtcattgccagcatggcggtggatccggtcgccgatcccgaccttgtgcgtgttgatgctcacgatatcttcagccacagtacaaccaaaattggttttcgccgtagtactttcttgcgcagttatatgtatgatttcattcagcgttttgcaccgcatttaacgcgtgatgtcgttgatgcggctgtcgcattgcgctctaatgaagaaattgaggtcatgtttaaagatataaaactgccggaaaaataatttcttgcgttattttcggcaccttttatgtagcgaaggtgccggaatatattctcttttgttacttatttctataccgtgcacaatatttttatccctcatatttatagggtaaattacctgtaaagtagtgtctaattacccgcctcgcaaactccagttttcaaatatctatttcaggtcaaaagattgaattattcactggagacgattcgtaaattcgctggatttttgactaaagtttctttaggatttgtctcatcgtatgattaattacaccaatcgttcaacgtcttgctgataagtgatggcgattatatgaggttagcaatgccttctggaaatcaggaaccccgccgcgatcctgaattaaaacgtaaagcctggctggcggtttttcttggttctgcacttttctgggtggttgtcgcactgctgatttggaaagtgtggggataactatggtcggtcaggagcaactggagtcgtcaccattatgccagcatagtgacaatgaaacagaaacgaaacgggaatgttccgtcgttattccagacgactggcaactaacatcgcagcagcaagcctttatagaactgtttgctgaagatgatcagccgaaacaataattatcatcattcttattacccatttttaatgaattaaagggcttttaatacaccgcagcaataacagcttgagttatctcaacacaaaataataaccgttaagggtgtagcctatgatcaacacaaatatgaaatattggtcctggatgggcgcgttttctctgtcgatgctcttctgggccgaactcctctggatcattactcactgatccttgaccccgctgcggcggggttgtcatttgctttgccacaaggtttctcctcttttatcaatttgggttgttatcaaatcgttacgcgatgtttgtgttatctttaatattcaccctgaagagaatcagggcttcgcaaccctgtcattaaggaggagctatgagcagtaccctacgagaagccagtaaggacacgttgcaggccaaagataaaacttaccactactacagcctgccgcttgctgctaaaagtctgggcgatatcacccgtctacccaagagtctcaaagttttgctcgaaaacctgctgcgctggcaggatggtaacagcgttaccgaagaggatatccacgcgctggcaggatggctgaaaaatgcccatgctgaccgtgaaattgcctaccgcccggcaagggtgctgatgcaggactttaccggcgtacctgccgttgttgatctggcggcaatgcgcgaagcggttaaacgcctcggcggcgatactgcaaaggttaacccgctcagtccggtcgacctggtcattgaccacagcgtgaccgtcgatcgttttggtgatgatgaggcatttgaagaaaacgtacgcctggaaatggagcgcaaccacgaacgttatgtgttcctgaaatggggaaagcaagcgttcagtcggtttagcgtcgtgccgccaggcacaggcatttgccatcaggttaacctcgaatatctcggcaaagcagtgtggagtgaattgcaggacggtgaatggattgcttatccggatacactcgttggtactgacagccacaccaccatgatcaacggccttggcgtgctggggtggggcgttggtgggatcgaagcagaagccgcaatgttaggccagccggtttccatgcttatcccggatgtagtgggcttcaaacttaccggaaaattacgtgaaggtattaccgccacagacctggttctcactgttacccaaatgctgcgcaaacatggcgtggtggggaaattcgtcgaattttatggtgatggtctggatagtctaccgttggcggatcgcgccaccattgccaatatgagcccagaatatggtgccacctgtggcttcttcccaatcgatgctgtaaccctcgattacatgcgtttaagcgggcgcagcgaagatcaggtcgagttggtcgaaaaatatgccaaagcgcagggcatgtggcgtaacccgggcgatgaaccaatttttaccagtacgttagaactggatatgaatgacgttgaagcgagcctggcagggcctaaacgcccacaggatcgcgttgcactgcccgatgtaccaaaagcatttgccgccagtaacgaactggaagtgaatgccacgcataaagatcgccagccggtcgattatgttatgaacggacatcagtatcagttacctgatggcgctgtggtcattgctgcgataaccagctgcaccaacacctctaacccaagtgtgctgatggccgcaggcttgctggcgaaaaaagccgtaactctgggcctcaagcggcaaccatgggtcaaagcgagcctggcaccgggtagcaaagtcgtttctgattatctggcaaaagcgaaactgacaccgtatctcgacgaactggggtttaaccttgtgggatacggttgtaccacctgtattggtaactctgggccgctgcccgatcctatcgaaacggcaatcaaaaaaagcgatttaaccgtcggtgcggtgctgtccggcaaccgtaactttgaaggccgtatccatccgctggttaaaactaactggctggccagcccgccgctggtggttgcctatgcgctggcgggaaatatgaatatcaacctggcttctgagcctatcggccatgatcgcaaaggcgatccggtttatctgaaagatatctggccaagcgcacaagaaattgcccgtgcggtagaacaagtctccacagaaatgttccgcaaagagtacgcagaagtttttgaaggcacagcagagtggaagggaattaacgtcacacgatccgatacctacggttggcaggaggacagtacctatattcgcttaagccctttctttgatgaaatgcaggcaacaccagcaccagtggaagatattcacggtgcgcggatcctcgcaatgctgggggatagtgtcaccactgaccatatctctccggcgggcagtattaagcccgacagcccagcgggtcgatatctacaaggtcggggtgttgagcgaaaagactttaactcctacggtagccggcgtggtaaccatgaagtgatgatgcgcggcaccttcgccaatattcgcatccgtaatgaaatggtgcctggcgttgaagggggggtgacgcggcatttacctgacagcgacgtagtctctatttatgatgctgcgatgcgctataagcaggagcaaacgccgctggcggtgattgccgggaaagagtatggaagtggctccagtcgtgactgggcggcaaaaggtccgcgtctgcttggtattcgtgtggtgattgccgaaagctttgaacgaattcaccgtagcaatttaattggcatgggcatcctgccgctggaatttccgcaaggcgtaacgcgtaaaacgttagggctaaccggggaagagaagattgatattggcgatctgcaaaacctacaacccggcgcgacggttccggtgacgcttacgcgcgcggatggtagccaggaagtcgtaccctgccgttgtcgtatcgacaccgcgacggagttgacctactaccagaacgacggcattttgcattatgtcattcgtaatatgttgaagtaacaactatttgcttgccggttattttgcttccggcaagcaaatgaattacacaatgcaagagggttatttgttcagcaaatggcccattttctcggctttggtatcgagataatgttcgttattggggttacgacctacaatcaatggtacgcgttcaacaatattaatccctgcttcggtcagaatttcgacttttttcgggttattggttaacaagcggacttcattgacgccaaggagtttgaacatatcagcgcaaagagtgaagtcgcgctcatcagcggcgaagcctaactggtggttagcctctacggtatcgtaaccttgatcctgcagtgcgtaagcgcggattttattcagcagaccaatgttacgaccttcctgacggtgatacagcaaaataccacggccttcctcggcaatttgcgtcaatgccgcttcgagctggaagccacaatcgcagcgcaagctgaacagggcgtcaccggtcagacattcggaatggacgcgcgcaagtaccggggtatgcccggaaatatcgccatagactagcgcgacatgatcgtgtccggttgccagttcttcaaatcccaccatcaggaaatcgccccatggggttggcagtttggcttctgccacacgtttaagctgcatgaaattctccagataatgctggttctgtattggcttattttgccataacgagaaggggttcacctaatcacgacgcgtcgatcgttcacggaatggcacaaatctgtcaatttttcctggaactggcgttttcagttatgattgtgggacttatcaaaaaggagaggccatgcgtagcattgccagacgtaccgcagtgggagctgcactattgcttgtcatgccagtagccgtatggatttctggctggcgttggcaacctggagaacaaagttggctactaaaagcggctttttgggttactgaaactgtcacccagccctggggcgtcattacacatttgattttattcggctggtttctctggtgtctgcgttttcgcattaaggctgcctttgtattatttgccattctggcggccgcaatccttgtgggacaaggcgttaaatcctggatcaaagacaaagtccaggaaccacgaccttttgttatctggctggaaaaaacacatcatattccggttgatgagttctacactttaaagcgagcagaacgcggaaatctagtgaaagaacagttggctgaagagaaaaatatcccacaatatttgcgtagtcactggcagaaagagacggggtttgcctttccttccggtcacacgatgtttgctgccagttgggcactgctggccgttggtttgctgtggccgcgtcggcgaacgttaaccattgctatcttgctggtctgggcaacgggagtcatgggaagccgcctgctgctcgggatgcattggccacgcgatctggtagtagctacgttgattagctgggcgctggtggcggtggcaacgtggcttgcgcaacgaatttgtgggccattaacaccacctgcggaagaaaatcgcgaaatagcgcaacgagaacaagaaagttaacgctggttgattttccgaatttagcccttaaatcatcaacaatgcgtgtggatgccatttcgcagacggcgcgaaaatggtactttaaagggctattgcggtaagttgaccataatttattcgctctaaccacataacgggaagtaatgtgaaatatttactcattttcttactggtgttagcgatcttcgtgattagcgtcacgttgggtgcgcagaacgatcaacaggtgacgtttaattatctgttagcgcaaggggagtaccgtatttccacattgctggcggtattgtttgctgcggggtttgctatcggttggttgatttgtggcctgttctggctgcgagttcgtgtttccctggcgcgcgctgaacgtaaaataaagcgactggaaaaccagcttagtcccgcgactgacgtggctgtagtgccgcacagcagtgcggcgaaggaataactttctatgctggagttgttgtttctgcttttgcctgtagccgctgcctatggctggtatatgggccgcagaagtgcgcaacaaaacaagcaagatgaagccaaccgcttgagccgtgattacgtagcgggggttaacttcctgcttagtaatcaacaggataaagcggtagacctgtttctcgatatgcttaaagaggatacaggcaccgttgaagcccaccttacgctcggaaacctgttccgtagccgtggcgaagttgatcgcgctattcgcatccatcagaccctaatggaaagcgccagcctgacctatgaacagcgtctgttggcgattcaacaactggggcgtgattacatggccgccgggttatatgaccgcgcggaagacatgttcaatcagctgaccgatgaaactgacttccgcattggcgcgctgcaacagttgctacaaatctaccaggctaccagtgagtggcagaaagcaattgatgttgccgaacgcctggtgaagctgggtaaagataaacagcgcgtcgaaattgcccatttctactgtgagttagccctgcagcatatggccagcgacgatctcgatcgtgccatgaccttgctaaaaaaaggggcggcggcagataaaaacagcgcccgcgtatccataatgatgggacgcgtgtttatggcgaaaggagaatacgccaaagccgtcgaaagtctgcaacgcgtgatatcccaggacagagaactggtcagcgaaacgctggaaatgttgcaaacctgctatcagcagttgggtaaaactgccgaatgggcagaattcctgcagcgtgcggtggaagagaacaccggtgccgatgctgaattgatgcttgctgatatcatcgaagcgcgcgacggtagtgaggccgcacaggtctatattacgcgccagcttcagcgtcatccgaccatgcgtgtgttccataagttaatggattaccacttaaatgaagcggaagaagggcgtgccaaagagagcctgatggtgctgcgtgacatggttggcgagaaggtacgtagtaagcctcgttatcgttgccagaaatgtggttttaccgcatacaccctctactggcattgtccgtcttgtcgggcctggagtaccattaaaccgattcgcggtcttgatggcctgtaatttttaaaaaaaatccgactttagttacaacatactaattattaatgttccattgtgctccggcaacgacggcgcagaaaaagcctgccaggggagaaatcgcaactgttaattttttatttccacgggtagaatgctcgccgtttacctgtttcgcgccacttccggtgcccatcatcaagaaggtctggtcatgacgttaactgctagttcttcttcccgcgctgttacgaattctcctgtggttgttgcccttgattatcataatcgtgatgacgcgctggcctttgtcgacaagatcgacccacgcgattgtcgtctgaaggtcggcaaagagatgtttacattgtttgggccacagtttgtgcgcgaacttcaacagcgtggttttgatatctttcttgacctgaaattccacgatatccccaacactgcagcgcacgctgtcgctgctgcagctgacttaggcgtgtggatggtgaatgttcatgcctctggtggggcgcgtatgatgaccgcagcgcgtgaggcactggttccgtttggcaaagatgcaccgcttttgattgctgtgacagtgttgaccagcatggaagccagcgacctggtcgatcttggcatgacactgagtcctgcagattatgcagaacgtctggcggcactgacgcaaaaatgtggccttgatggtgtggtgtgttctgctcaggaagctgtgcgctttaaacaggtattcggtcaggagttcaaactggttacgccgggcattcgtccgcaggggagtgaagctggtgaccagcgccgcattatgacgccagaacaggcgttgagcgctggtgttgattatatggtgattggtcgcccggtaacgcaaagcgtagatccagcgcagacgctgaaagcgatcaacgcctctttacagcggagtgcatgatgagtgattccaacagccgtctggtctacagtacggaaaccggacgtattgatgagtccaaagcggcccctgtacgccctaaaggcgacggtgtggtgcgtattcagcgtcagaccagtggacgtaaaggtaagggcgtttgcctgattaccggtgtcgatctcgatgatgccgaactgacaaaacttgcagcggaactgaagaaaaaatgcggctgcggcggagcagttaaagatggagttattgaaatccagggcgataagcgtgatttattaaaaagtctacttgaagcgaaagggatgaaggtaaaactcgcaggcggttaacataaaaagccacggatatatccgtggctttcgaatattttactgtgcgtattattcagttatttcgtactgaacagaatcaagcgtattataattgcgagtcgataatcgacatttatttacgattatttaccgacctggtgaccaataacacctccgacagctgcaccacctaatgtacccaacgtactgccatcggtcagtactgcaccgcctaatgcccctgcacccgcgccgattgcggtgttgcggtcccgtttagaccagttagaacaggcactcagagacattgccaaagtaattgccagaacagccgcggtcatttttttgctcgttacaaacataatactctctcctgaatttatgattcacggaagtaagctctctataactataatagctaagaataagtctggtgaaattattccgtgaaatctgctcgcgcgcagggttatatcacgcaggtgataatgacttcctgttatatcgctgataataattttatatcttgagagtgttaataacaggtaaatagtcttaattatcaaccaggaatcatcttagagcggatgatttgccaaactgcaaatcatccgtagagaagggaaatggttaaatgtcaacgacgtgaatggtgagtttactgtgctcaagatgcatcagatcgctggcgcgtattttgctatcggtaatcacgcgattgaatcgctcaacgggaccgatggagtaactatgtacagcaccaaatttgctgctgtcagtcaggactatcgcttcgcactctttttccagcacggcattgaccacatcggtacgcatcatatcgcgaccggtaaatccagtttcaggttgccagccatcaataccaataaatgctttgctgaaatgcacctgttggatgcactggcgtgtcaaagggccaaccatactttcgctttttttctgatacacgccaccgagcaaaataacttcacaaggcgcgtctttcagcaaatgcgcgatgtagctgctgaccgtgatgatagtgacatttttcttctgctcgcccagagtccgggcgagtagggcattgctgctgccattttcgataaagatggtttcgcccggttgaaccaggctcgcggcaaactcggcgagttcacgcttcagcgtatagttgctcatcatacgggtttcgacgtcatcactatcaaggctaacagcaaagccatgtgcacggcggaggtaactcagtttttcgagtgtgttgagatcctggcgaatggtaacttcagaaactccagtggcttttgccagatcggttacgctaacctgaccctggtcaatgaccatctgtagaatagtttgttgtcgggaattcatcgctgtaattcttataacgttataatacttaataaaaaaatactgacgcgccgggcatcctcaaataggaaaacctgaaggcacgattgttaaatctcccacggtgccttcgggatgtctggcgtagattcagcaacctggcgcaagagttctgctttaagtatctcgagattatggatcgcagagtggtaatcgcctgccacaaggatatctaacacaatatcaatacgttcggcaacgcgctgggcatcaaattcagacatcaaggacatccttatagcaaaagggggaaaatgaataatgcaaaaattgccgctaaaagagaagtgtttaacagcaacggctaattatcatccaggaatacgatatataatgacgggatatagcgctaagtatatatattcatctacttatgcgcgcttcagatagcgtttataccagcgttcgaaggcgacggcgggcatcggtttggcaaacaaaaatccttgccgctcattgatcccgttcttggttaaaaaagcatcttcctttgcactctctacaccttcggcgatcacctgaagattcaatgcctgggccacagcgacgatcgcccggaccagactctggctgacaggttgtttgtgaatatctcgaacaaaaacctggtcaagtttgatggcatcgatcggaaagcgcgccagttggctaagactagagtagccggtaccaaaatcatccagatgcacttgcgcacctagttggctaaattgttgaataacagacagtgccagttcatcattctcaatcagacaactctctgtcagttcaacatctatagggcagtattcaaaattgagttcctggagaacctgtttcagggcggtgaaaatggtttgatcggcgagctgacgtgcagaaatatttaccgccactcgcaggtttatgcctttatcccgccactttgccacctggcgtacgacatcgagaatcacccaacggcctaaaggcacaattagcccactctcttcggcgtaggaaatgaagtccaacggtggaatcaacccacgttcaggactctgccaacgtactagtgcttccagactgcgcacttcgccacgccaggtgattttcggttgatagtgaataaccaactgatcgttttccagtgctttacgcaagttggtatccagccagagatattcaaatacccgttgattcatttctggggtaaaaacgcaaaattgtcctcgtccgccttccttcgctgtgtacattgctgtgtcggcgtgacgaataatagccgtgctgtcactaccatgttcgggagagagtgcaatacctacactacagctggtataaacttcaattaaaccaatgcgaaaggggagccgtaagcgggtcaaaattcgacttgccattgcttccagcgcgctttgactggtgttggatgccagtaccagaaactcatccccacctggacgagccaacacctggtcatgttcgagacagcttaaaatagccaaactcacgtcgcgtaataactggtcaccaaacaaatgcccataggcgtcgttgacctttttgaaattatccaaatcaagatacacaaccccaactttattgttatctgcatgattaatagcgtgatcgattaaatcctgcattgcgttacgattcggcagtccggtgatactgtcggtatttgccagaatacgcagtcgctcctgagcgcggcgctcttcggtaatgtcggtgccggaacagattaaaaaaatctcgtttttgccactgccgctgtggacaaatttattgcgaaacagaaacagccgctggcctttacatgttggtatccacagttcgacttcatatgcattgccgcttcgaaaaaatacacggttattgcgcctggatgccgcagcttcacgacggctcataaacagtttaaacacgctttgcccaatgacgtcgtgttctttcaaccctgtgtaatcttcacataaccgattgaagcgttggatattcccccggctgtcgagaatcactattgcggaatatgcttcagaaactacctgctcagcaaaggaaagcccgtgacttaaatcacgagcaaccgccggtgtgtcatgccatgcagacgcgttgccagcccattcccgtttattgatttttcgtcctaccagatgcacagaaagatcgctttcatcgacggtcagactcatcatcaggctggaggtgatggccgtcatttccctgatgcgagcagcctgttcggcagataactgcaatgtacgatcaggttctgtggtttcggtggtagaaaagcgcaaaacatcgctgctttccgtcaaccgccagtatggattgtggcttccgagaaagttgtacaacgttgtggactccctaacggttttcatgatgcatatcctccggttaacagcggagtccgcggttaaataaaaggaacaacatgacttacatgaaattaacggcggctaaacgcattgttttttttatatatttatttgtaatccagttttggaaaaacgccagttttcaaacgaaagtcagttaaaaaatctgcctggatataacgaaggtagagcggggaaataaacggcccatccatgaggaatgggccgtgaaaggagattacgcgaccgggcgcgcaataatgctgcgggtttccatgcggacttcggcaatagtgacgtcaataacgtcagtcactttgtaaaccgtttcacctttaatttgtacagtgccgttttcctggctgcaaaccagttcatcgcgcacagcgtgtaagaaaggtgccggaataaaggcgatagcgccgttatcaaccaaacgaacacgcatgccgccacggctgatatcgacaatttccgctgcgaaacgggtgtcggtcccggctttgtctttcaggaagcgtgcgtataaccagtcaccaacatcacgttctgccatccggttgagacggcgacgctcggccatttggacagtgatttcatcctgtgggcgcgtcgcagtttcgcctttgataaccgctttcagcagacggtggttgatcatgtcgccatatttacggatcgggctagtccaggtggcgtatgcttccagaccgaggccaaagtgaggaccgggttcagtgctaatttcagcaaaactctggaagcgacgaatgcggctgtcgaggaaaccagttggttgcgcgtccagttcacgacgcagtttgcagaaaccgtccagcgtgagcacttcttcggcatcgacatgcagaccgtgcgttttcagcaacgctgccagcgcgtcggcattcgccggatcaaagcccatatgcacgttatagatgccaaaaccgagcttatcgcgcagtacgcgggccgcacaaatgttagcggcaatcatcgcttcttcgacgatacggttggcaatgcgacgaggctcggcgacgatatccagcacttcacctttttcaccgagaataaagcggtaatccgggcgatctttaaacaccagtgcgtggttatgacgccactcgccgcggcgttggcaaatttgcgctagcaaacggacttgttcggcaattgcttcactttcaggctgccagtcaccggtattttccagccagtcagaaacctggtcatacaccagctttgctttggattcgatggtggcggcaaagaattcgatattatcttcaatggtgccatcagcggagagcgtcatgcggcatgccagtaccgggcggacttcattggcgcgcagactgcagagatcgtcagaaagctcgcgaggcagcatagggatgttgaagccaggcagatagttggtgaatgcgcgaattttcgcggctttgtccagcttgctgccttcagcaatccacgcggttggatcggcaatcgccacaatcagctgaagtttgtcatccggcaacgccttagcgaaaagggcgtcatccatatcttctgtgctggcactgtcgatggtgacaaaatccagcgcggtcagatcttcacgaaccagaccttcatcgagcatttcggtagcgacgccgtctggtgcttctttttccagattatggcgtgcaagggtaacccaccacggtacaaagtgatcgtcaccaaaagtgatgtattgtgtcagttctgcatagaaagaacgatcgcctttcagcggatgacggcgcatttcggcaaccgcccagtcgccttctttaaactcgtggttcaggccacgggctgcgcggcaaggaatggcgtcttttaagagtggatgatcaggaacgatggccagacggtcatttttgccctgaaccttacccacgaaacgagtcaggaacggttcaaccagttcttctggctctgcggattcacgttctttttcactgtggatcaccgcgataattcggtcgccatgcatgacttttttcatctgcggcggcggaatgaaataacttttttgcgcgtcgacttccaggaagccaaagcctttttctgtggcttttaccaccccttcagcgcgtggcgtctgggaatgcagttgctgtttaagctgcgctagcagcgggttgtcctgaaacataattgtctattttggtggccattagagcggctgacagttttacgcgaatctgtctgacgcggcaaggttaatatgtctcacccaacgcgatttttaagcgatttatccagccacacagcccgctccataccagcagattaataatctgcgtactacttttttcgtgttcgagtaaagggctgaactgggcggcgctaaagcgatcgggtgctcgggtcagccattgtatcgcctgaacggtagcgcgctcaacagaatgacggtcagcccattggttaatttcattttcgcccttgcgcataagggtgctgatttttttatattcattactactatccatacaggtggcaaaacaagcaggactgccatttatacgcgcgcataacaacgccgcaagctgattatccggctgtgtattgccccgtgtgctgtttaacaacttttcgagaagggaaagactaatagggtggagagagagtatttcggccagttggcaaagttctgcagtactactttttgtgtgctcttcaggtagtttttccacctcatagctgcttcgccagcgtaaactttcatcagcaaacagactcgcgtcggcgtagttttgtatctccagcccgggtaaccagcgtaccggatgcccgagataagcctgaaatgtcgcaattgtccgcgcctgaaagccaataaaaccaatgatttggctaatgatcacacagtcccaggcagtaagaccgacgtcattcagatgctggcggcttcggttgtcgataatagaagggctgctagccagttggcgggcatattgcgtgatttgtgccaaccgatgattactttccctggtggaatcaggcccggggagcggcgtaagtcgcgcgctatagtagttacataaccgctggacgccgcaaacctgagcaaccgtcagggccgtgctcaagcgttcataagcggtgaaggtctgactacgggtcacggtaagctggtcagggaacaaatccactgcaagaacacgcgcagggtccagccaactaaggaagggggccagcgtttctttttcaaggatcacgtcgagtagaaagggatcgctgacctttgcggcttccgggaccagaggcagaacgtcatactccgtagtactggattgcgtttcatgataccagtggcttttgccggtgatgtggcgttgttccatgggcgctccttggtcgtaaaggaaatcgttatcctgacgcaaggcgggaaggggagaaagacggatcggcgataacaaatatcagaaaggtataacagagataacgggcggcagaacgccgcccatctttaccaacagaacgattatttcagttcgagttcgttcattgcagcaatgctgaaaccgccgtcaacgtggaccacttcaccggagataccggcagagagatcggagcacaggaatgccgcagagttacccacatcttcaatagtaacggtacggcgaatcggggtaacggcttcgcaatgagccagcattttgcggaagtctttgataccggaggccgccagagtacggatcggaccagcagagatggcgttaacacgcacaccttccggacccatcgcgttcgccatatagcgcacgttcgcttccagagacgcttttgccagacccataacgttgtagttcgggatagcgcgctcagcgccaaggtaggaaagggtcagcagggcagaacccggattcagcatggagcggcaagcttttgccattgcaacgaagctgtaggagctgatgtcgtgggcaattttgaagccttcacgggtaacggcgttaacatagtcaccatccagctgatcgccaggtgcaaaaccaatagagtgtacgaaaccgtcaaatttcggccaaactttccccagttcagcgaacatggtgtcgatgctggcatcttctgcaacatcgcactgcagaacgatgtcagaacccaattgagcggcaaattcttctacgcggcctttcagtttgtcgttctggtaggtgaatgccagttcagctccttcgcggtgcatcgcctgagcgataccgtaggcgatggatagtttgctggcaacaccggttaccagaatgcgcttaccggaaagaaaacccatagctttaatccttattgttgatgcttgttgtgcctgaaaatcaggcgattcgtcgttttagtaaacagtacgaacagataaacggttattataatcaacctggctgtgagtagctatagttgccaggtccgaccggagcaggctgcggcagggggggcgcttttcccctcaccctaaccctctccccagaggggcgaggggaccgtattgtgcaaatattgttaccccagcaacaaacaggctcatacagcccctaaccctttcatggcgatggctgggacggttcagaccttgccgaatattctccagcaccgtctccatgttttcaccacaacagctattcggctcggtctgccccctcgctctttcagggagagggactccggcggttcagttcctgcagaatattctccagcaccgtctcctcattacaatcaatctcgttattccagaaacgcagcacggtccagccctggctctcaagccagctagtgcgcctggaatcataggcaactgctaaatcatgctgcccaccatccagctcaacgactacacgcgcgctgcagcaagcaaaatcgagaatgtagctccccactggatgttgacggcgaaatttgaaatcactaaaacgtcggctgcgaagatatcgccagagctttcgttcctgcaaagtgagattgcgtcttaaatcacgcgcattacttttaattttatctatcacctcattctgacaagatttaatcttttgtcagaatgaggtgaataatctggaaggaggattcagaaaattagcgatctttacgccacgcatccgccgtcaatgcctcgccaaaatgaccggcaatcagccgtttggtgagttcatgcagcgggcttgccagcacatccgcggtgctgcctcgctcgacaacctcgccctgatgcatcaccagcacctggtcgctaatgtgcttcatcattccgatatgctgggtaacataaatatagctaatgccctgtttttcctgtaattccagcatcagattaatcaactggctacgcatgctcatatccagactagcgagggcttcatcggcaataatgacttttgggcgcaatatcagcgcgcgcgccagacccagacgctgtttttgtccgggtgccaacatatgcggatagtaactgacgtgatccggtagcagcccaaccatacgcatcgtttcaataatctgtttgcgacgctgttccggttccaggtcggtgttcaggcgcagtggaaaatccagaatttggctgatacgttgacggggattcaagctggtgctaggatcctgaaaaatcatgcgaatacgctgactgcggaaggaataatcgccaaaatgcagtggatgatcgtcaatcaataactcgccgctggtaggctctatcattcccgccagcatttttgccagcgtggatttaccgctaccattctcgccaataatcgccagtgtctggccttcacgtagcgtaaagctcaagggttttaccgcttctacggtctgacgacgaaaccagccggtccggtagcggaacgttttacttaaattacgcacttcaagcagcgtttcgatcatctcactctttctccatgttcagcgggaaatgacaggcatagagatgatttttcgcccccgtcaaacgtggcgtcacaatgcattctcgttgtgcatacgggcaacgtggccccagacgacaaccaatcggtaactgttccagcagtgggatagcgccgggcagcgtattgaggcgacttttatgcggcatcgcgctgccgaagtctggtatcgcgcggatcagcgcctgggtataaggatgatgtggcatcgtcaccaactccttactcggcgcggtttccactgtttgaccgcagtaaagcacgttaattttatccgcccattggctaagcatttgtaagtcatggctgataagcaaaatagtggtattgctgttttggttgagacgcgtcagcaggcgaaagatttgcgcctgggttgttggctccatactgttggtcggttcgtcagcaatcagcagacgcggttgattcgccagtgcaatggctatcatcactttctgacattcaccttcggtcaactcatagggaaaactgcgcatcgcatctttgtgatctttaatccccacgcggtgcagcagttcaatggcacggcgtttgcgccagccaaaacgctgccaccaacggcctttataggtccaggctgggatgttttgcatcaactggcggcccacacgttcactagggtcaagacagctctgcggttcctggaaaatcatgctcacgttatggccaaccagtttgcgccgttcgcgtgcggagagacgcagcaaatcgatatcatcaaaacgcatacggtcagcagtaacacgccagttatctttattcaccccacaaatcgctttcgcaatcaaactcttgccggaaccggattcaccaacaagaccgcggatttcaccttcggttaaggtcatacttacccggtcgacggctttaacccactcatcaccggttttaaattcaatggtcaggttacgaatatcgagtaatggcattattccacccccgcaataatcgcacgacgaacgccatcgccaaggaggttaaccaacaacacgctaatcataattgccgcacctggcagcatgacagtccacggggcgacataaatcagttccagcgcatcaccgagcatcgctccccattcagggctggggagttgtgcgccgagatcgagaaagcccagcgcggcgatatcgagaattgccatgctcagtgcgcgggtgatctcggtgaccagcccggcggtgatgtttggcatcacagcaaaccagagaatattcagcgtacttgcgccatccagacgggcggcgataacgtactctttttccagttcgtcatgcaccatgctgtaaatgctacgtaccatacgcggcagcaatgccagccagacagcaaacatagcgtgggacaaactcggtccggcaaacgctacaacgataattgccaacagcaggctagggatcgccagtaaggtatccagaatatggttaagcaccgcactgcggaggccgtgtgtcgccccggcgaaggtgcccagtaccaggccacagatcgtcgcggcaagcgtcaccacaaatgcgccacccacggttggcgcagctccgctcagtaaacggcttaaaacatcgcgtccgaggtcgtcagtccccaggaagaaagaaacttcgccatagcggctccaactcggcggcaataattgataaccgagaaattgctggtcgatgccgtaaggcgcaaaccagccgccaaaaatacacagtacagccagccccgcgcagccgtacaggccgaccatcgcagaggcgtcactataaaatttgcgccaggcggtacgcagcgtgcccggcgggcgcttttcgctgtatacgctatcgtaaggcataccattccttatgtttcagattatttatcgtaaggcataccattccttatgtttcagagggttagccatggcacccaaaatatcagaaatcacgttaacaataatgaccagactgccacacaccatcactccggcggaaatggctgcgtaatcctgctggcggatggcgttaattaaccagcgccctaaacccggccagctaaaaaccatttcggtgatcatcgccagcgtcagcatggtggaaaactgtaagcccaggcgaggaataaccggcggtaacgcgttatgcagaacgtggcgacgcaaaatagtaaagcggctcaaaccgcgggtcgccgccgcttttacatagttctggtcatacacttcgatagtgctgatacgcatcaggcggatcacttcagttgttggcgcaacgctcagggtgatcacgggcaatatcatatggcggattgcgctcatgatcatttcatcccgccatggactgtcgctaagccaggcatcaatcaacgcaaaaccggtaatcggtttcacttcgtagagcagatcgaaacgcccactaacgggcaaccaacctagcgtgagactacaaaacagcgtcaacagaagcgccagccagaacaccgggatactaaagcccagtaaggcgatggcgttgatcaagttatcctgccacttatggcgcgtaatcccggcaatcatccccacggggatgccaacaatcagcgcaaaaccgaaggcgaggatgcacagttccatcgtcgccgggaagacctcttttaactgttcggcaatcggttgaccgttaatgctggaaacaccaaaatcccagtggatcaggccgttaaaccagaacacccaggcattccacagactcgcgccttgtaacggcgcatgaggggtgaaatagctcaagctgaagccaacgaaggtcagcaggaacaaggtgacaatcaataacaaaatgcggcgtaaggtgaagataatcatggttttttcacctcatcctgtttctcgcgatacaccccagcaaaggaggcgttaccaaacgggctaagtaccagacctttgatatcgtaccgataggcctgcaaacgcaaactgctcgccagcggcaaaatgggcaattcctgcgccagaatactctgcgcttcgtcataggcttcaatacgcgccgccagctgctggctagagagcgccttacgcaatacgctgtcgaatttcggatcgcaccagtgggcgaggttggtctggctatgaattgccgcgcagctcagtaacggacggaagaaactgtccgggtcgttactgtccgtcgcccaaccggataacgtcagatcatggctcatatccatcaaccgcgcctcctgaaagcgaccttctaccggcacaatcaccacttttacgccaacctgcgccatatccgcctgaatcagttcggcagttttcagtggactggggttccacgcctggctacgtgtgggcacccacagtttcagcgttaaattttccagccccaagctcttcaactgttcgcggcttttcgccggattgtattcagtaattttagcctcgttgtcataggcccagctggcgcgcggtaaaatagaggccgccgtttcagccgtaccataatagatggattgcatcaggcgctggttattaatcgccagtgccagcgcatggcggacagcgggattatttagcggcggtttggcggtgttaaatgccagataggcgacgttcatcccaggacgcagcgttaaacgcaagcgcgggtcgtcacgcaaaatggatagctggctggcagcaggccaggccagaacgtcgcattccccggtcaggagtttgctcagacgtccggtgccgccggagcctaaatccaccactacctgcggcattaacggtttaccgcgccagaagtcatcatgacgttgtaggcgaataaattgcccggcgcggtattcgctcaactgatacggaccggtgccgaccggttgacggtcgagttgctcctggcgatcttctttctctaacttccgggcatattctgcgctcatgacgctagcataatgggttgcgaggtgccacaaaaaagaagcatccggctgggcgagtcggaactcaacggtatgattatccagtttgcggacgcttttcacgttatcggcaaattgcaggctgtcgaagtaggggaagttgctgccgttgacgttatgccacgggttgttgcggtcaaaaattcgctggaaggtaaacaccacatcgtcggcattcattttacgagtgggagtaaaccagtcggttttttgaaacggaacatcgcgacgcaggtggaagcgataggtcgcgccgttgtcgagtacttcccagctttcggcaagttccggcatcaggcgataggtatagggatcgacatccagcagtcgatcataaaactgggcggcaagggtatcgacaattaacccactgctcgctttggatgggttaaaggtgttgacttgcccgctgacgcaatagacaaaaccgctgtcgcggatatcagcatgcgggggagattcaggcgcggcgattgcctgaccactcacaagtccagcaatcaccaaaagagagcttaatacctggcgcataatattaagggattttatgtaaagaggctatcttactaatatttaatgacatttgccattaccgtttgtgttcaggggtcgtaatgagggccgtgtggttggtcgttgaacaggtgacgtcgccatctgttcaacattcgtacccgtgatttctctataactataactcacagaacaacttagcgaggagcagagcggtacgatcgtgagaaacccattaaagcacgctgcagtgcgtgtcattgttagccagatgcggcgtgaacgctttatccggacaacgatactgaccgatcgtctgcaattaaatcattactcattaccccattgattcaaaaactctgcgatctcatcaatgcgtacgggattaatccccgcttcagcagccatttcatgttgggcttcttcgctgatctcttcattgttcatcaaacgggtgagcagtaactggaagtagtgggccagcggtgtgcgttcagcctctgcgacaggctctgcgcattcggtcgcgtactcatcggcaatatcaaaatattttagcgggatatcgtggttcattatttgcccctggggttaatgcgctaagcataagggcggatgatagcactcgtgatccgggtcatacatctttttatagttaatggcgcggcgcgttaccctcaggcaggataatgcgccgcgcatccgactattacgtttcactcaccggcgttctgtcaccatcatacaacggcactttgcgatagcggcggatcagataccataaatatgcgccgcctaagctagcccataccagaccgagtgtcagactcgtactctcgaggttaacccacagcacacccaccgtcagcgcgccaaccagcggcatcagcaaatagtggaagtgatccttccagcttttattcattcctttacgccgccagaaatgattaaacacgctcagattcacgaaggtaaacgccaccagagcaccgaagttaattaacgctgtggcggtaactaaatcgaagaacagcgcgctcaacgcgacaatcccgaccataatgacgttgagtgccggagtccgccattttgggtgcacatagccaaacacgcgctccggaaacacattgtcacgccccatcacatacagcagacggctcacgctggcatgactagccaggccagaggctaacgtgttcacaaacgtggtgcagaggaaaatgctctggaagagcttgccgccgacgtacagcgcaatttcaggcagtgcggcatccggatctttaaagcggctgatatcgggaaagaacagctgcataaagaagctcgccgcgataaagataacgccaccgtagaccgccgtcaggaagatggctttcgggatcacgcgtgcggcgtccggcgtctcttcgctaagcgtggtcaccgcatcgaaaccgaggaaggagaaacagacaatcgtcgccccggtaataatcgggatcaggtgcgcgttctcgctgataaacggctgaagactccagacggtgccaacgccttctcctttatgcagtccctgaactaccaggaagataaacaccaccatgatggagatttgcaccagtacaaacagggtattgaagttagcgaccaggttgacgctcttcagattcgcggcggttaaaatggcgacgaaggttaccacccacacccacggcggcacttccgggaagagggcggagagatagattttcgccaacaagacgttaatcatcggcaaaaagagataatccagcaggctactccagccgaccataaatccgacgtgcgggttaatgctcttttgcgcgtaggtataggcgctaccggcctccggaaactggcgaaccagtttgccgtagctgatagcggtaaacagcacacccgccagcgccagcaaataggacgccggaacgtgaccgtcgctaatgccggagacaataccaaaagtatcaaatacggtcatcggcgtgagataggccagacccatcatcaccacctgccacaatttcagactttttcgcagacgggttttgccgggttgcgcagcaatattcagtggactattaatagccataattgctgcctcccctgcgtaataaggtttgcggtcgtgtcgacctgaaatcaaacctgtttagcaagggaagcaaagggggcggagtccagtcagtagcaggaggggcgcatacgcagcctccctcgccatgcggggatttaatcatcggcatcatctcatttcctcgtcacagtcttaatcgttaacggaagcccgttgccgcccgcgctccataacgcgacatccgggaaatgtctggattaccagcaaatgtcaggcctggctccgctcaggccgatgaaacaaccccgcaaggggtattacgcgtttttcaacatccactcaatttctgtttctgtgatgaggcgctcaaactgcaacagctcatcatttttacaggcgtgatagacatggcagaagcgttcgcctaaatagcggcgcaggtgatcattctcgataaactcacccagggcatcgctctggcgaatcggaaagggtaagccttcctgttccagcccgttgccttcgacttcttcctgcaacggcagctcgttatcaaggccatgcaaaataccggcaaaaatcgctgccatcaccagatatgggttggcatcggcacccgccacgcgatattccacgcggtgattatgacggtcgccgcacggaatacgcagggcgacggtgcggttgttatggccccagctcgcctgcgtcggcacatacattcccggctggaagcggcgatagctgttcacgtttggtgccagcaacgccatgctgctcggcatcaggtcaatcatcccggcgagcatctttttcagcagcgggctatcttcgccttccgcgtcagaaagcacgttctcgccacgattattttgcatactgatatggatatgcattccgctgcccgcgtgctcttcatacggcttcgccataaaagtggcgtgcatcttatgcttttctgccatcagacgcaccaggcgttttagtgccagcgcatcatcgcaggcttccagcacgttatcagtatggtaaaggttgatttcaaactgacccgggctggcctcagcgaccgcgccatctgccggaatcagctgtaactgcgccagttcatcaatatcattgagcacgtcggcgaagtggttgaggttatcaacggagtaaacctggctttgtgtattgcggtcatcggtgccaggcgcgcagggcggttgcagatacccttcagcgtcgcgctggcgatccagtaaatagaactccagctctaccgctacgaccgggaacaatccgcgctggcgcagctgctgccacaggcggttaagaacgttccgcggctcaacgtcaaagggagcgccatcttcatcgaccatggtcaggagcatctgaccgataaactctggatcggcggcagaaggagttaaggaaccgagaacaggaacacaggtacgatccggctcgcccatttcctgacccagacctgcttcttctactacgttgcccagaatatccattgcaaatacgctggccgggaaataacaccctttctcgagcttcttcaggctactaacaggaatacgctttccacggaagcaaccatttaaatcggtaagtaaaacatcaacatattgcgtattcgggtagcgctccaggtagcgtttcacttcctgcgtaaaggcgctaccccgcctctcttcactctgctgaacaaagttctctacttcaacgatattggtttccatgattcttcgcctttggtttgttttccgctcgttatcaaagcgtaaaatataatgaccaccattcgaatctgtatgcaaactaaatgtttgtcaaatgttaaattgagtttgcaaaaatgaaaacccactgctagattgaaaaaatattgaacataaaggtcatttaaagcgcagtaatggcgataatttagtccactttgtgagattgagcatggaaaatataatgaacaatccggttatcggtgtcgtaatgtgcaggaacaggcttaagggtcatgcgacccagactctgcaagaaaagtacctgaatgccatcatccatgcaggcggcttgcctattgcgctaccacatgcgctggcggaaccgagtttacttgaacaacttttgccgaaactcgatggcatttatcttcctggtagtcccagcaatgtgcagccgcacctatatggtgaaaacggcgatgagcctgacgccgatcccgggcgtgatcttctgagcatggcgataattaatgccgcactcgaaaggcgcatccccattttcgccatctgccggggtttacaagaactggtggtggcaaccggtggtagcttgcatcgcaagctgtgcgaacagcctgaattgctggaacatcgggaagatcccgaactgccggtggaacagcaatatgcaccgagccatgaagttcaggttgaagaggggggattactgtctgcgttgttacctgaatgtagcaacttttgggtaaactctctacatggacaaggggcgaaggtcgttagcccacggttgcgtgttgaagctcgcagcccggatggcttagttgaggcggttagcgtcatcaatcatccttttgcgctgggcgtacagtggcacccggaatggaacagtagcgagtacgcgcttagccgtatattgttcgagggctttatcaccgcttgtcagcaccatatcgctgaaaaacagcgactctgaccactacagtttaaggaaatgcaaatatgagtgatgagggactggcgccaggaaaacgcttgagcgaaatccgccagcagcaggggcttagtcaacgtcgtgccgccgaactctccgggctgactcacagtgctatcagtacgatagaacaagataaagtcagccctgccatcagtacgctgcaaaagctgctgaaggtgtatggtctgagtctcagcgaattcttttccgagccggaaaaacctgatgagccgcaggtcgtcattaatcaggacgacttaattgagatgggtagtcagggtgtgagtatgaagctggttcataacggtaacccgaatcgcacgctggcgatgatctttgaaacgtaccagccgggcacaaccactggggaaagaattaagcatcagggtgaggaaataggcactgtactggaaggtgaaattgttctgacgattaatggtcaggattaccacctcgtcgcggggcaaagttatgccattaataccggcatcccgcacagtttcagtaatacgagcgcaggtatttgccgaattatcagcgcccatacgcccaccacgttttaatctttttgttctgtaagccgggtaagcgcaatgcgcccggcaatctatacacaaaatcattcaagttgcatcaaggcggcaagtgagcgaatcccgatgagcttactcaggtaagtgattcgggggagcgaacgcagccaaggcagaggcggcttgaaggatgaagtgtatataaagaatgtcgccagaaataaacgggcatacggcccggggatctctgcgccctgacgttcacaaactgcatatatctgatagacgtgaaacaggagtcataatgaattttcatcatctggcttactggcaggataaagcgttaagtctcgccattgaaaaccgcttatttattaacggtgaatatactgctgcggcggaaaatgaaacctttgaaaccgttgatccggtcacccaggcaccgctggcgaaaattgcccgcggcaagagcgtcgatatcgaccgtgcgatgagcgcagcacgcggcgtatttgaacgcggcgactggagtctctcttctccggctaaacgtaaagcggtactgaataaactcgccgatttaatggaagcccacgccgaagagctggcactgctggaaactctcgacaccggcaaaccgattcgtcacagtctgcgtgatgatattcccggcgcggcgcgcgccattcgctggtacgccgaagcgatcgacaaagtgtatggcgaagtggcgaccaccagtagccatgagctggcgatgatcgtgcgtgaaccggtcggcgtgattgccgccatcgtgccgtggaacttcccgctgttgctgacttgctggaaactcggcccggcgctggcggcgggaaacagcgtgattctaaaaccgtctgaaaaaagtccgctcagtgcgattcgtctcgcggggctggcgaaagaagcaggcttgccggatggtgtgttgaacgtggtgacgggttttggtcatgaagccgggcaggcgctgagccgtcataacgatatcgacgccattgcctttaccggtagtacccgtaccgggaaacagctgctgaaagatgcgggcgacagcaacatgaaacgcgtctggctggaagcgggcggcaaaagcgccaacatcgttttcgctgactgcccggatttgcaacaggcggcaagcgccaccgcagcaggcattttctacaaccagggacaggtgtgcatcgccggaacgcgcctgttgctggaagagagcatcgccgatgaattcttagccctgttaaaacagcaggcgcaaaactggcagccgggccatccacttgatcccgcaaccaccatgggcaccttaatcgactgcgcccacgccgacagcgtccatagctttattcgggaaggcgaaagcaaagggcaactgttgttggatggccgtaacgccgggctggctgccgccatcggcccgaccatctttgtggatgtggacccgaatgcgtccttaagtcgcgaagagattttcggtccggtgctggtggtcacgcgtttcacaagtgaagaacaggcgctacagcttgccaacgacagccagtacggccttggcgcggcggtatggacgcgcgacctctcccgcgcgcaccgcatgagccgacgcctgaaagccggttccgtcttcgtcaataactacaacgacggcgatatgaccgtgccgtttggcggctataagcagagcggcaacggtcgcgacaaatccctgcatgcccttgaaaaattcactgaactgaaaaccatctggataagcctggaggcctgaaatgaccgaacataccagcagttactacgccgccagtgcgaataaatatgcaccattcgacacgctgaatgagagtatcacctgcgacgtttgcgtggttggcggcggctataccgggctctcctccgcgctgcatctggcggaagcgggctttgacgtagtggttctcgaagccagtcgcatcggctttggcgcaagcgggcgcaatggcggacagcttgtgaactcctacagccgcgacatcgacgtgatcgaaaaaagctacggcatggacaccgcccgtatgctcggcagcatgatgttcgaaggtggtgagatcatccgcgaacgtatcaaacgttatcagattgactgcgactaccgccccggcggcctgtttgtggcgatgaatgataaacagctcgccacacttgaagagcagaaagagaactgggaacgctacggcaataaacagctggaattgctggacgccaacgccattcgccgtgaagtagccagcgatcgctataccggtgcgctgctggatcacagcggtgggcatattcatccgctaaaccttgccattggcgaagcggacgccatccgcctcaacggcgggcgcgtgtatgaactttctgccgtgacgcagatccagcacaccacgccagccgttgtgcgaactgccaaaggtcaggtgacggcgaagtatgtgattgtcgccgggaatgcgtatctgggcgataaagtagagccggaactggcgaaacgcagcatgccgtgcggcacgcaggtgatcaccaccgaacggctgagcgaagatttagcccgtagcctgatcccgaaaaactactgtgtggaagactgtaactatctgcttgattactaccgtcttaccgccgacaaccgcctgctgtacggcggcggcgtggtctacggcgcgcgcgacccggatgacgttgagcgccttgtggtgccgaaactgctgaaaaccttcccgcagctgaagggcgtgaaaattgattaccgctggacgggcaacttcctgctgaccctgagccgtatgccgcagtttggtcgcctcgataccaacatctattacatgcagggctacagcggccacggcgtgacctgtactcatctagccggacgtttgattgccgaactgctgcgcggcgacgccgaacgtttcgatgccttcgccaatctgccgcattacccgttccccggcgggcgcacgctgcgtgtgccgtttaccgcgatgggcgcggcgtattacagcctgcgcgatcgtctgggcgtttaattttcgattaaccgtgaagagtcaaaaggtgtgaaacatgagcaacaatgaattccatcagcgtcgtctttctgccactccgcgcggggttggcgtgatgtgtaacttcttcgcccagagcgctgaaaacgccacgctgaaggatgttgagggcaacgagtacatcgatttcgccgcaggcattgcggtgctgaataccggacatcgccaccctgatctggtcgcggcggtggagcagcaactgcaacagtttacccacaccgcgtatcagattgtgccgtatgaaagctacgtcaccctggcggagaaaatcaacgcccttgccccggtgagcgggcaggccaaaaccgcgttcttcaccaccggtgcggaagcggtggaaaacgcggtgaaaattgctcgcgcccataccggacgccctggcgtgattgcgtttagcggcggctttcacggtcgtacgtatatgaccatggcgctgaccggaaaagttgcgccgtacaaaatcggcttcggcccgttccctggtagcgtgtatcacgtaccttatccgagtgatttacacggcattagtacacaggactccctcgacgccatcgaacgcttgtttaaaagtgacatcgaagcgaagcaggtggcggcgattattttcgaaccggtgcagggcgagggcggtttcaacgttgcgccaaaagagctggttgccgctattcgccgcctgtgcgacgagcacggtattgtgatgattgctgatgaagtgcaaagcggctttgcgcgtaccggtaagctgtttgccatggatcattacgccgataagccggatttaatgacgatggcgaaaagcctcgcgggcgggatgccgcttagcggcgtggtcggtaacgcgaatattatggacgcacccgcgccgggcgggcttggcggcacctacgccggtaacccgctggcggtggctgccgcgcacgcggtgctcaacattatcgacaaagaaagtctctgcgaacgcgcgaatcaactgggccagcgtctcaaaaacacgttgattgatgccaaagaaagcgttccggccattgctgcggtacgcggcctggggagcatgattgcggtagagtttaacgatccgcaaacgggcgagccgagtgcggcgattgcacagaaaatccagcaacgcgcgctggcgcaggggctgctcctgctgacctgtggcgcatacggcaacgtgattcgcttcctgtatccgctgaccatcccggatgcgcaattcgatgcggcaatgaaaattttgcaggatgcgctgagcgattaatagcccaacgcaataatgtctgatgcgctgcgcttatcaggcctgcaaacgacgtattgattatgtatgccgaataaagcattcacgccgcatccggcaagttgtattgctcaacttcgttaaatctggtgctttttcaacaacgcgcggaactgatgataagttaaccccagtaattcagccgcgcgcttctggttatatttcccttgttgcaaactgagttgcagcaactctttttcctgctgcatctgaaactcacgtaaatccagcggcagtgttggaaggctggtggtttcactaacggcgatagcgtcttcaggcggacgccgtttaaagggatcaataatgatgtcatcaagcggataatcgctggtgccgtggcgatacacactacgttccaccacgtttttcaattcacgaatatttcccggccaacgataattcagcaatgtttctctggcgcgctccgtaaaccccgggaacagaggcagcttgatttcccgacacatctggatggcaaagtattctgccatcaacattatgtcgctttcgcgctcgcgcagtggtggcagttgtacaacatcaaaagccagtcggtcgagcaggtcagcgcgaaaagtgccttcattgaccatcgccgggagatcggcattcgtcgcgcataccaaccgcacattcacctgcaatggttggctgccgccaacgcgctccagttcaccgtactcaatcacgcgcaataatttctcctgcaccatcatcggtgccgtagcgagttcatcaagaaatagcgtaccgccgtcggcacgttcaaatctccctggatgacgtttttgcgcaccggtaaacgcccccgcttcgtgaccaaacagttcggaatccagcagattttcatttaacgccgcgcagttaagggaaataaacggcccttgccaacgggaggagagataatgcaggcggctggcaatcagctctttaccggtgccgcgttcgccgatgatgagcaccggtttgtccagcggtgcgagatggctaacctgttccagcacttcgagaaagctgttcgcctcaccaagtaaattatctttgtattctgccatgatgaaattcgccacttgttagtgtaattcgctaactcatcctggcatgttgctgttgattcttcaatcagatctttataaatcaaaaagataaaaaattggcacgcaaattgtattaacagttcagcaggacaatcctgaacgcagaaatcaagaggacaacattatgggtattttttctcgctttgccgacatcgtgaatgccaacatcaacgctctgttagagaaagcggaagatccacagaaactggttcgtctgatgatccaggagatggaagatacactggttgaagtacgttctactagcgcgcgcgcgttggcagaaaagaaacagctgactcgccgtattgaacaagcgagcgcgcgtgaggttgaatggcaggaaaaagccgaactggcgctgctgaaagagagagaggatctggcacgtgcagcgttaattgaaaaacagaaactgaccgatctgattaagtccctggaacatgaagtgacgctggtggacgatacgctggcacgcatgaagaaagagattggcgagctggaaaacaaattgagcgaaacacgcgctcgccagcaggcattgatgttacgtcatcaggcggcaaacagcagccgcgatgtgcgtcgtcagctggacagtggcaaactggatgaagcaatggctcgtttcgaatctttcgaacgtcgtattgaccagatggaagcggaagcagaaagccacagcttcggtaaacaaaaaagcctggacgatcagtttgccgaactgaaagccgatgatgcaatcagcgaacaactggcacaattaaaagccaaaatgaagcaagacaatcaataataacatccaggcggcgtccgaacgcgccgccgctcatcgtctaaggagtacttatgagcgcgctatttctggctattccgttaaccatttttgtgctgtttgttttaccgatctggttatggctgcattacagcaatcgttctggtcgcagtgaattgagccaaagtgagcagcagcgattagcgcaactggctgatgaagcaaaacggatgcgcgaacgtattcaggcgctggaatctattcttgatgcagaacatccgaactggagggatcgctaatggcgggcattaatctcaataaaaaattatggcgtattccacagcagggcatggtccgcggcgtctgcgccgggattgccaactattttgatgtaccggtaaaactggtgcgtatcctggtggtgctgagcattttcttcggtctggcgctgtttaccctggttgcttacatcattttgagttttgcgcttgatccaatgccggacaacatggcctttggtgagcagctaccttccagcagcgaattgctggatgaagtcgaccgtgaactggcggcaagtgaaacgcgtttacgcgagatggaacgttatgtcacttccgatactttcacgttacgtagccgtttccgtcaactgtgaggaaagttatgaatactcgctggcaacaggccgggcaaaaggtaaagcctggtttcaaattagcaggcaagctggtacttcttaccgcactgcgctatggcccggcgggtgtggcgggctgggcgataaaaagtgttgctcgccgaccgctgaaaatgttgctggctgtggcgctggaaccgctgttaagtcgggctgctaataaactggcacagcgttataaaaggtgaggggagtttcgcaaaaattgttaaatctcaggcgtataatggatggcaattttcatccatagaaggacgcttacatgtttaaaaaaggcttacttgctctggcactggtgtttagtctgcccgttttcgccgctgaacactggatcgatgttcgtgttccagagcagtatcagcaagagcacgttcagggggccatcaatattcccctgaaggaagtgaaagagcgcattgccaccgccgttccggataaaaacgacaccgtgaaagtgtattgcaatgccggacgccagagtgggcaagcaaaagagatccttagcgagatgggatatacccacgttgagaacgccggtggcctgaaagacatcgcaatgccgaaggtcaaaggttaaaagaattcaccatgagcggcgcttatgcgccgtttttttttctgtcacaccttatttacatccccatagattatttgcgtcagctcacaaatacgctttttccctggtaaaaaatgatttcctgcgtgactaaaacccttgtgctcaattgacagtttattttctgcggagtagtctctcgtttcatgggaccgctaccacggaaaggcaacatgaaacagaaaattacggattacctggacgaaatctacggtggaacatttaccgcaactcatttacagaaacttgtaacgcgtcttgagagtgcgaaacgattaattacacagcgacgtaaaaaacactgggatgaaagtgatgtcgtgttaattacctatgccgatcaatttcacagcaatgatttaaaaccattacccacatttaatcagttttaccatcaatggctgcaaagcatttttagtcatgttcatttgttgccgttttatccatggagttctgatgatggctttagcgtaattgattatcatcaggtcgccagtgaagcgggggagtggcaggatattcagcaactcggtgaatgcagtcatttaatgtttgattttgtctgcaaccatatgagcgcaaaaagtgaatggtttaaaaactatttacaacagcatccaggttttgaagatttttttattgccgttgacccgcaaaccgatctcagcgccgtcactcgcccgcgtgcgttaccgttattaacgccattccagatgcgcgatcatagtacgcgccatttatggaccacctttagtgacgatcaaattgacctgaattaccgtagccctgaagtgttgctggcgatggtggatgttttactctgttaccttgcgaaaggtgctgagtatgtccgcctggatgccgttggctttatgtggaaagagccgggaacaagctgcatccatctggaaaaaacacatctgattatcaaactgttacggagcattattgataacgttgcgccaggtacagtgatcattaccgagaccaatgttccgcataaagacaacattgcttactttggcgcaggcgatgacgaagcacatatggtgtaccagttcagcctgccgccactggtgctgcatgcggtgcaaaaacagaacgttgaggcgctttgtgcgtgggcgcaaaacctgacactaccttccagcaacaccacctggtttaacttcctcgcctctcacgatggcatcgggctaaacccgctacggggcttgttgcctgaaagcgaaatattagagctggtcgaggcgttacagcaggaaggtgcattagtaaactggaaaaataatcccgacggtacacgcagtccgtatgaaataaatgtgacctatatggatgcgttaagccgccgtgagagtagcgatgaagaacgttgcgccaggtttatccttgcccatgcgattttgttaagtttccccggtgtgccagcgatatatattcaaagtattcttggcagccgtaatgattacgcaggtgtcgaaaaactcggatataaccgtgcgattaaccgtaaaaaatatcacagtaaagagataacccgagaactgaacgatgaagctacattaaggcatgcggtatatcatgagttgagccgtttaattacacttcgtcgcagccataacgagtttcatccggataataattttaccattgatacgattaatagttccgtaatgcgtattccaagaagtaacgctgatggtaattgtctgactggattgtttaatgtcagtaaaaatattcagcatgtaaatattactaatctgcatggtcgggatctgattagtgaagttgatatattgggtaatgaaataacgctgcgcccctggcaggttatgtggattaaataaaaaggaacatctcatgattaaaagtaaaatcgtgctgttaagtgcactggttagttgcgccctgattagtggctgtaaagaagaaaataaaacgaatgtatccatcgaatttatgcattctagcgtggagcaggagcgccaggccgttatcagtaaattgattgcccgttttgaaaaagaaaaccctggcatcaccgttaagcaagtgcccgtggaagaagatgcctataacactaaagtcattactcttagtcgtagcggtagcctgccggaagtgatcgaaaccagccatgactacgccaaagtgatggacaaagagcagcttatcgatcgcaaagcggttgccacagtcatcagcaacgttggtgaaggcgcgttttacgatggcgtactgcgtattgtgcgtaccgaagatggtagcgcatggaccggtgttcctgtcagcgcctggattggcggtatctggtatcgcaaagatgtgctggcaaaagcggggcttgaggagccgaaaaactggcaacagctgctggacgttgcacagaaactgaatgacccggcgaataaaaaatacggcattgcgctgcctacagcagaaagcgtgttgacggaacaatccttctcccagtttgcgttatccaaccaggctaacgtctttaacgccgaaggcaaaatcacccttgatacaccagagatgatgcaggcactgacctattaccgcgaccttactgccaacactatgccgggttctaacgacatcatggaagtgaaagacgcctttatgaacggcaccgcgccgatggcgatttactccacctatatccttccggctgtgattaaagaaggcgacccgaaaaacgtcggtttcgtggtgccaaccgagaaaaactctgcggtctacggcatgttgaccagcctgaccattaccgccgggcaaaagaccgaagagacggaagcagcagaaaaatttgtcacctttatggagcaggcagacaacattgccgactgggtgatgatgagcccaggtgctgcgctgccggtgaataaagcggtggtgactaccgccacctggaaagacaacgacgttattaaggcgctgggtgaactaccgaatcagctaatcggtgaactgccaaatattcaggtttttggcgcagtaggggataaaaactttacccgcatgggtgatgtgacgggttctggcgtggtgagtagtatggtgcataacgtcaccgtgggtaaagccgatctctctactacgctgcaagcgagccagaaaaaactggatgaactgatcgaacagcactaaacccaggacaggaatccgcaatgaacaggctttttagtggtcgttccgatatgccctttgcgctgctgcttctcgcgcccagcttattactgctgggcggtctggtggcgtggccgatggtgagcaatatcgaaatcagttttttacgtctgccgctcaatcccaacatcgagagtacgtttgttggggtgagcaactatgtgcgtatcctctccgatcccggcttctggcatagcctgtggatgacggtctggtataccgcgctggtggtggcgggcagcaccgtgctcgggctggcggtggcgatgtttttcaaccgcgagttccgcctgcgcaaaaccgcgcgtagcctggtgatcctctcctacgtaacgccgtccattagcctggtgttcgcctggaaatacatgttcaacaacggctacggcattgttaactacctcggcgtcgatcttctgcatctctatgagcaggcaccgctgtggttcgataatccgggcagtagctttgtgctggtggtgctgttcgccatctggcgctacttcccgtatgcctttatcagctttctggcgattttgcagaccatcgacaaaagcctgtacgaagcggcagagatggatggcgctaatgcctggcaacggtttcgtatcgtcacgctgcccgcaattatgccggtcctggcgacggtggtgacactgcgcaccatctggatgttctacatgttcgcggatgtttatttgctgacgaccaaggtcgatattctcggtgtatatctctacaaaaccgcctttgcctttaatgatttaggaaaagcggcggcgatcagcgtggtgctcttcatcattattttcgctgtcattctgctgaccaggaaacgggtgaacctcaatggcaacaaataaacgcacactcagtcgcatcggtttttactgcgggctggcgctgtttctcatcatcacgctgtttccattttttgtgatgctgatgaccagcttcaagggcgcgaaagaggcgatcagtctgcatcctacgctgctgccgcagcagtggacgctggagcattacgtcgacatttttaacccgatgattttcccgtttgtcgactacttccgtaacagtctggtggtgtctgtggttagttccgtggtggcggtattcctcggcattcttggggcttacgcgctttcccgcctgcgctttaaaggtcggatgaccatcaacgccagcttttacacggtgtatatgttctctggcattttgctggtggtgccgcttttcaaaatcatcaccgcgcttggcatttacgacactgagatggcgctgatcatcaccatggtgacgcaaactctgcccaccgccgtgtttatgctgaaaagctacttcgacaccatccccgatgagatcgaagaagcggcgatgatggatggcctcaaccgtctgcaaattatcttccgcatcaccgtgccgttggcgatgtccgggctgatatccgtgttcgtctactgctttatggtggcgtggaacgactatctgtttgcgagcattttcctctccagcgccagcaatttcaccttaccggtgggcctgaacgcgctgttcagtacgccagattacatctggggacggatgatggcggccagtctggtgaccgcattgccggtggtgattatgtatgcgcttagcgaacgttttattaagagtggtttgaccgccggtggcgtgaagggctaaagcggccagtttctttacaaggagttttaaatgaaaaagttagtagccacagcaccgcgtgttgctgcgctggttgagtatgaagatcgggcgattttagctaatgaagtgaagatccgcgtgcgtttcggcgcaccgaaacacggaacggaagtggtcgacttccgcgccgccagcccgtttattgatgaagactttaacggcgaatggcagatgttcactccgcgtccggcagatgcgccgcgcggcattgagtttggcaaattccagcttggcaacatggtggttggcgacattatcgagtgcggcagcgacgttaccgactacgcggtgggcgacagcgtatgcggctacggcccgctctccgagacggtcatcattaacgcagtgaataactacaagctgcgcaaaatgccgcaaggcagctcctggaaaaacgccgtctgctacgacccggcgcagtttgccatgagcggcgtgcgcgatgccaacgtgcgcgtaggggattttgtggtggtggtagggcttggcgcaatcggtcaaattgccatccaactggctaaacgcgctggcgcttctgtggtgattggcgtcgatcctatcgcccatcgctgtgatattgcccgtcgccacggcgcggatttctgccttaaccccatcggcactgatgtaggtaaagagatcaaaacgctgaccggcaagcagggtgccgatgtgattatcgaaaccagcggctacgccgacgcgctgcaaagcgcgctccgcggtctggcttatggcggcaccatctcctatgtcgcgtttgccaagccgtttgccgaaggttttaacctcggacgcgaagcgcatttcaataacgccaaaattgtcttctctcgcgcgtgcagcgaaccgaacccggattatccgcgctggagccgcaagcgtattgaagaaacctgttgggaactgctgatgaacggttatctcaattgcgaagatttaatcgacccggtggtgacctttgccaatagcccggaaagctatatgcagtatgtcgaccagcatccggaacagagcatcaaaatgggcgttacgttttaattcaaaggaatgaaaaaaatgaaaatcggcacacagaatcaggcgttctttccggaaaacattctggagaaatttcgttatatcaaagagatgggcttcgatggttttgagattgacggcaaactgctggttaacaacatcgaagaagtcaaagcggcgatcaaagaaaccggtttaccggtgaccaccgcctgcggtggctatgacggatggattggcgactttatcgaagagcgtcgtcttaatggcttaaagcagatcgagcgcattctcgaagcgctggcagaagtgggcggtaaaggcatcgtcgttccggctgcgtggggcatgtttaccttccgcttaccgccgatgaccagcccgcgtagcctggacggcgaccgcaaaatggtgagtgattccctgcgcgtactggaacaggtcgccgcgcgtaccggaaccgtggtgtatctcgaaccgttaaaccgctatcaggatcatatgatcaacaccctcgccgatgcccgccgttacatcgtcgaaaacgatcttaaacatgtacagattatcggcgatttctatcacatgaatatcgaagaagataacctggcgcaggcgctgcatgacaaccgcgacctgctcggtcatgtgcatattgcggataaccatcgctaccagccgggcagcggcaccctggatttccacgcgctgtttgaacagctgcgcgcggataactatcagggctatgtagtgtacgaagggcgtatccgggcggaagatcctgcccaggcgtaccgtgatagcttggcctggttgcgtacctgctaagaggtctttgtgaaaagtgcaatgacaagctctccgctgcgggtcgcgataataggcgcaggccaggtggcggataaggttcatgctagctactactgcacccgcaacgatctggaactggtggctgtctgtgacagccgcctttcccaggcgcaggcgctggcagaaaaatacgggaatgcatccgtgtgggacgatccgcaggccatgctgctggcggtgaaacctgatgtggttagcgtctgcagtcctaaccgttttcattacgaacataccctgatggcactggaagcgggctgccatgtgatgtgcgaaaaaccgcccgccatgacgccagaacaggcgcgggaaatgtgcgataccgcgcgcaaactgggcaaggtgctggcctacgactttcaccatcgttttgcgctcgatacgcaacagctgcgtgaacaggtgaccaacggcgttttgggagagatttacgttaccaccgcccgcgccctgcgtcgctgcggcgttcccggctggggtgtctttaccaataaagaactgcagggtggtggcccgctgatcgacatcggcattcatatgctggatgctgcgatgtatgtgctgggctttccggcggtgaaaagcgtgaatgcgcatagctttcaaaagatcggcacgcaaaagagctgtggtcaatttggtgagtgggatccggcaacttacagcgtcgaagatagcctgtttggcaccattgaatttcataacggcggcattctgtggctggaaacgagttttgcactcaacatccgcgaacagagcattatgaacgtcagcttttgtggtgataaagctggtgcgacgctgtttccagcacatatctacaccgataacaacggtgaattaatgacgctgatgcaacgggaaatagcagacgacaaccgccatttgcgcagcatggaagcctttatcaatcacgtacagggcaagcccgtgatgatagccgacgccgagcaggggtacatcatccagcaactggtggcggcgttgtatcaatccgcagaaacagggacgcgtgtggaattatgaccaggccagtaacgttaagtgaaccccatttcagccagcataccctgaacaagtatgcaagcctgatggcgcaggggaacggctatcttgggcttcgcgccagccatgaagaagattacacgcgccagacgcgagggatgtatctggcggggctgtatcatcgggcgggaaaaggtgaaatcaacgaactggtgaacctgcctgatgtcgtggggatggagattgccataaatggtgaggttttcagcttatcccacgaagcctggcagcgtgagcttgactttgccagtggcgaattacgccgcaatgttgtctggcgtaccagcaacggcagtggttacaccatcgccagccgtcgctttgttagcgcagaccaactgccgctcattgcgctggaaatcactattacgccactggacgccgacgcgagtgtgctgattagtacaggcattgacgccacgcaaaccaatcacggtcgccaacatctcgacgaaacccaggtgcgggtgtttggtcagcatctgatgcaggggagctacaccacccaggatggacgcagtgatgtggccatcagctgttgctgtaaggtgagcggtgatgtgcagcaatgctataccgccaaagagcgccgtttactgcaacataccagtgcgcagcttcatgcaggcgagacaatgacgttgcaaaaactggtgtggatcgactggcgggatgacaggcaagctgctttagacgagtggggcagcgcgagccttcgccagcttgaaatgtgcgcgcagcagagttacgaccaacttcttgcagcaagtacagaaaactggcgtcaatggtggcagaaacgtcgtatcacggtaaatggcggcgaagcgcacgatcagcaagcgttagattatgcgctttatcatctgcgcatcatgacgcctgcccacgacgagcgcagcagcattgcggcaaaaggcttaaccggcgaaggctacaaaggccacgttttctgggatacagaagtatttttgttaccgtttcatctgtttagcgatccgacggttgcccgaagtttactgcgttatcgctggcacaacttgccaggcgcgcaggagaaagcgcgacgcaacggctggcagggcgcgctatttccgtgggaaagcgcgcgcagcggcgaagaagagacgccggaatttgccgccattaacattcgcaccgggctgcggcaaaaagtggccagcgcgcaggcggaacatcatctggtggccgatatcgcctgggcggttattcaatactggcagaccacgggggatgaaagtttcattgcgcatgaaggcatggcgctacttctggagacggcaaagttctggattagccgcgcggtgagagttaacgatcgtctggaaattcatgatgttattgggccagacgaatataccgaacatgtcaataataatgcatacaccagctatatggcccgctacaacgttcaacaggcgctgaatattgcccgccagttcggctgtagcgacgatgcgtttatccatcgcgccgaaatgttcctcaaagagctatggatgccagaaattcagcccgacggcgttttgccgcaggatgatagctttatggctaagccggcgattaatctggcgaaatacaaagcggcggcggggaagcaaaccatactgctggattatagtcgcgcagaagtgaacgagatgcagatcctcaaacaagctgatgtggtgatgctcaattacatgctgccggagcagttcagtgcggcaagctgtcttgccaatctgcaattttatgaaccgcgcactattcacgacagcagtttaagtaaagcaatccacggcattgttgccgcacgctgtggcctgctgacccaaagttatcagttctggcgcgaggggactgaaatcgatcttggtgctgatccgcatagttgtgatgatggtatccatgctgccgcaactggcgctatctggctgggggcgattcagggttttgccggggtgagcgtgcgtgacggtgaattgcatctcaatccggcgttacctgagcagtggcaacagttgtctttccctctgttctggcagggctgcgaattacaggtcactcttgacgcgcagcgtattgcgattcgaacttctgcgcccgttagtctgcgtttgaacggtcagcttataaccgtggctgaagaatctgttttctgtttgggtgattttattttgcccttcaatgggaccgctaccaaacatcaggaggatgaatgaaactgcaaggggtaattttcgatctggatggtgtaatcaccgataccgcgcatctgcatttccaggcgtggcagcagattgccgctgaaattggcatcagcattgatgcgcagtttaacgaatccctaaaagggatcagccgcgatgagtctctgcggcgcattctgcaacacggggcaaagagggcgactttaacagccaggagagggcgcaactggcgtatcgcaaaaatctgctctatgtccacagtctacgcgagttgacggtcaacgctgttctacccggcattcgctctttgctggcagatctccgtgcacagcagatcagcgttgggctggcttctgtctccctgaatgcgccgacgattttagcggcgctggagctgcgcgagtttttcaccttctgcgcggatgcttcccaacttaaaaacagcaaaccggacccggaaatctttctcgccgcctgtgcagggctgggcgtgccgccgcaggcatgtatcggcattgaagatgcgcaggcgggcattgacgccattaacgccagcggtatgcgcagcgtggggatcggcgcgggcttaaccggggcgcaattactgttgcctagtacggaaagtctcacctggccgcggttaagcgccttctggcaaaacgtataacaaaggaatcaacatggctcagcttagcttacaacatattcaaaaaatctacgataaccaggtgcatgtggtgaaggacttcaacctggaaattgccgataaagagttcatcgtgtttgtcggcccgagcggctgcggtaagagcaccaccctgcgcatgattgccgggcttgaggagatcagcggcggcgatctgttgatcgacggcaaacgaatgaatgacgttccagccaaagcacgcaatatagcgatggtgttccagaactacgcgttgtatccgcatatgacggtttacgacaacatggcgtttggtctgaagatgcaaaaaatcgccaaagaggtgattgatgagcgggtgaactgggcggcgcaaattctcggcctgcgtgagtacctgaaacgtaagccgggggcgctttccggcgggcaacgtcagcgagtggcgcttgggcgggcgattgtacgcgaagcgggcgtgtttttaatggatgaaccgctctctaaccttgatgccaagctgcgcgtgcaaatgcgcgcagagatcagcaagctgcatcagaaactgaacaccaccatgatctacgtgacccacgatcagaccgaagcgatgaccatggcgacgcggattgtgattatgaaagacgggattgttcagcaagtaggtgcgccgaaaaccgtttataaccaacccgcgaatatgtttgtttccggatttattggaagtccagcgatgaattttattcgcggcacgatcgatggcgataaattcgttacggaaacgcttaaattaaccattcccgaagagaaattagcggttctgaaaacacaggaaagtttgcataagcccatcgtgatgggaatacgaccggaagatattcatccggacgcgcaagaggaaaataacatttccgccaaaattagcgtggcagaattaaccggtgcggaatttatgctctacaccacggttgggggcacgagttaaacggttgggggcacgagttagtggtccgtgctggtgcgttaaatgattatcatgcaggagaaaatatcactattcattttgatatgacgaaatgtcatttctttgatgcagaaacggaaatagcaattcgctaaatacagggggaaggcattcccccaggataatacaaggaacaataatgaaaaagttattaccctgtaccgcactggtgatgtgtgcgggaatggcctgcgcacaggccgaggaaaggaacgactggcactttaatatcggcgcgatgtacgaaatagaaaacgtcgagggttatggcgaagatatggatgggctggcggagcctagtgtctattttaatgccgccaacgggccgtggagaattgctctggcctattatcaggaagggccggtagattatagcgcgggtaaacgtggaacgtggtttgatcgcccggagctggaggtgcattatcagttcctcgaaaacgatgatttcagtttcggcctgaccggcggtttccgtaattatggttatcactacgttgatgaaccgggtaaagacacggcgaatatgcagcgctggaaaatcgcgccagactgggatgtgaaactgactgacgatttacgtttcaacggttggttgagcatgtataaatttgccaacgatctgaacactaccggttacgctgatacccgtgtcgaaacggaaacaggtctgcaatataccttcaacgaaacggttgccttgcgagtgaactattatctcgagcgcggcttcaatatggacgacagtcgcaataacggtgagttttccacgcaagaaattcgcgcctatttgccgctgacgctcggcaaccacagcgtgacgccgtatacgcgcattgggctggatcgctggagtaactgggactggcaggatgatattgaacgtgaaggccatgattttaaccgtgtaggtttattttacggttatgatttccagaacggactttccgttagcctggaatacgcgtttgagtggcaggatcacgacgaaggcgacagtgataaattccattatgcaggtgtcggcgtaaattacagcttctgataatgggctaaattgccggatgcggcgcgagtactttatccgatctataaatgtaggccggataagatgcgctagcatcgcatctggcattcaggcaaggtagctggtatttatttcagcgtcatatgcgtggcaacggtaatattctgtggactcggttttccagaaattaagcggaataataactcgcagctttgttgacctaactcctgcgtcggaacatcgatgccgcccggtgcaggcgttaaaataaaactcagcgtttcattgctataacccaccaccgctaactgctgcggaatagcaatatttttctctgctgccgcacgataaatgctcattaatttcaggctgtcagtggcaaacaccgcctcaggcaacggactctggcttaataattgccgtgctgcttttaatgcagtttcatgggtataaccgccatcaacaatccattcatcacgcactgcaatattatgcgcagccaggctctgcttataaccattaacgcgatcaacgctaacatggacatcaagcggagcatgcaggcaggcaatattttgatgcccactttcaattaatgcatcggtcaacgcaatgctgtcgccaaaattatcggtatcgacagaataaacatgggcatattgaccttcaactttgccaatcaccaccaccggaatatcatatttatcgagttgggcaaaaaaactctcatccgctgggctactgagcataataatgcctttaatcattttctgcttaattttgctttcgcatttttgcagatcttctgccggattgtggctcgtttgtaatatcacgtcgaaaccttcttcttcagctttggcggtgatggcatgcaaaacttcagagaaaaacggattacccgccgtagttttggtgctacgggtagaaatcaccataatggcatcaaaaccgctagaggtcagcgcgcgggccagcttgtttggctgatactgtaattcttcaatggcccgtaacactttttcgcgcgcttccggggagatattagtttgcttattcagcacgcgacttacggtggatttacttacgcctgcaaccctggcaatatcataaatagtaggggacataggtcaggaactccgtccgaacgtgaatgctgcacatcttatggagttcgccggtcgatgacaacacgggcagttgataatcaatggcctggcccccacattcatatccttacgaatgattttttttctggtcttcagagcagcacaggacagcaatgaagcgacttaaaaatgaactcaatgcgctggtgaatcggggtgtcgacagacatctgcgcctcgctgtaaccggacttagccgcagcggcaaaacagcgtttatcaccgcgatggttaatcagttgcttaatattcacgccggagcacgtttgccgctgttaagtgcggtgcgtgaagagcgcctgctgggcgtgaaacgcattccccagcgtgactttggcattccgcgcttcacctatgacgaagggctggcgcagttatatggcgatccacccgcctggccaacgccaacgcgcggcgtcagtgaaatccgcctggcgctacgttttaaaagcaatgatagcctgctacgccactttaaggatacctccacgctgtatctggaaattgtggattatcccggcgaatggttgctcgacctgccgatgctggcgcaggactatttaagctggagccgccagatgacgggcttactcaatggtcagcgcggagaatggagcgcgaaatggcgaatgatgagcgaagggctggacccgctagcgcctgccgacgaaaaccggctggcggacattgccgccgcgtggaccgattatctccaccactgtaaagagcaggggctgcactttattcagcctgggcgctttgtcttgccgggagatatggcaggtgcgcccgcgctgcaattcttcccgtggccggatgtcgatacctggggcgagtccaaactggcgcaggccgataagcataccaatgccggaatgctgcgcgagcgctttaattattactgcgagaaggtggtgaaggggttctataagaatcattttctgcgctttgaccgccagattgtgctggtggattgcctgcaacctctcaacagtgggccacaggcatttaatgatatgcgtctggcactgacgcagctgatgcaaagttttcactacgggcagcgtaccctgttccggcgtttgtttagcccggttatcgataagctattgtttgctgccactaaagcggaccatgtgaccatcgatcagcacgctaatatggttagtttactgcaacaactgattcaggatgcctggcaaaatgcggcgttcgaagggatcagcatggactgcctggggctggcgagtgttcaggcgaccaccagcggcattattgatgttaacggtgagaaaatcccggcgctgcgtggtaatcgacttagcgatggcgcaccgctcactgtttatcctggcgaagttcccgcacgtttgcctggtcaggcgttctgggataagcaaggcttccagtttgaggcatttcgtccgcaggtgatggatgtcgacaaaccactaccgcatattcgtcttgatgctgcgctggaatttttaataggagataaattgcgatgaccgaaccgttaaaaccacgtattgatttcgacggtcctctggaggtcgatcagaatcctaaattcagggcgcagcagacctttgacgaaaatcaggcgcaaaattttgccccggccacgctcgacgaagcgcaggaagaagaggggcaagtcgaagcggtaatggacgcagcgttacgtccgaaacgcagcctgtggcgcaaaatggtgatgggagggctggctctgtttggcgcaagcgttgtcgggcagggtgtacagtggacaatgaatgcctggcaaacccaggactgggtggcgctgggtggatgtgccgctggggcattgattatcggcgctggcgtaggttctgtggtaacagagtggcggcgcttatggcgcttgcgacagcgcgcccatgaacgcgacgaagcgcgtgatttattgcatagccacggcacgggcaaaggccgcgcattttgcgaaaaactggcgcagcaggcgggtattgatcagagccatccggcgctgcaacgctggtatgccagtatccatgaaacgcaaaacgaccgtgaagtggtcagcctgtatgcgcatttggtccagccagttttagatgcccaggcgcggcgcgaaatcagccgtagcgcggcggaaagtacgttgatgattgcggtcagcccgctggcgttggtcgatatggcgtttatcgcctggcgcaatctgcgtttaattaatcgcatcgccacgctgtatggcattgaactggggtattacagccgtttgcgtctgtttaagctggtattgctgaatatcgcttttgccggagccagcgaactggtgcgcgaagtggggatggactggatgagccaagatctcgctgctcgtttgtctacccgcgcagctcaggggattggtgcaggacttctgacggcacgactcgggattaaagctatggagctttgccgcccgctgccgtggattgacgatgacaaacctcgcctcggggatttccgtcgtcagcttatcggtcaggtgaaagaaacgctgcaaaaaggcaaaacgcccagcgaaaaataatgcaatatcgggtgctgaccggatatctttacgccgaagtgcccgtttttccgtctttgtgtcaatgattgttgacagaaaccttcctgctatccaaatagtgtcatatcatcatattaattgttcttttttcaggtgaaggttcccatgcgtctggaagtcttttgtgaagaccgactcggtctgacccgcgaattactcgatctactcgtgctaagaggcattgatttacgcggtattgagattgatcccattgggcgaatctacctcaattttgctgaactggagtttgagagtttcagcagtctgatggccgaaatacgccgtattgcgggtgttaccgatgtgcgtactgtcccgtggatgccttccgaacgtgagcatctggcgttgagcgcgttactggaggcgttgcctgaacctgtgctctctgtcgatatgaaaagcaaagtggatatggcgaacccggcgagctgtcagctttttgggcaaaaattggatcgcctgcgcaaccataccgccgcacaattgattaacggctttaattttttacgttggctggaaagcgaaccgcaagatagccataacgagcatgtcgttattaatgggcagaatttcctgatggagattacgcctgtttatcttcaggatgaaaatgatcaacacgtcctgaccggtgcggtggtgatgttgcgaagtacgattcgtatgggccgccagttgcaaaatgtcgccgcccaggacgtcagcgccttcagtcaaattgtcgccgtcagcccgaaaatgaagcatgttgtcgaacaggcgcagaaactggcgatgctaagcgcgccgctgctgattacgggtgacacaggtacaggtaaagatctctttgcctacgcctgccatcaggcaagccccagagcgggcaaaccttacctggcgctgaactgtgcgtctataccggaagatgcggtcgagagtgaactgtttggtcatgctccggaagggaagaaaggattctttgagcaggcgaacggtggtagcgtgctgttggatgaaataggggaaatgagtccacggatgcaggcgaaattactgcgtttccttaatgatggcactttccgtcgggttggcgaagaccatgaggtgcatgtcgatgtgcgggtgatttgcgctacgcagaagaatctggtcgaactggtgcaaaaaggcatgttccgtgaagatctctattatcgtctgaacgtgttgacgctcaatctgccgccgctacgtgactgtccgcaggacatcatgccgttaactgagctgttcgtcgcccgctttgccgacgagcagggcgtgccgcgtccgaaactggccgctgacctgaatactgtacttacgcgttatgcgtggccgggaaatgtgcggcagttaaagaacgctatctatcgcgcactgacacaactggacggttatgagctgcgtccacaggatattttgttgccggattatgacgccgcaacggtagccgtgggcgaagatgcgatggaaggtagcctggacgaaatcaccagccgttttgaacgcagcgtattaacccagctttatcgcaattatcccagcacgcgcaaactggcaaaacgtctcggcgttagtcataccgcgattgccaataagttgcgggaatatggtctgagtcagaagaagaacgaagagtaagcgcgaatatgcctgatggtgcaacaccatcaggcatattaaattatgctttcagtacagccagagctgcttcgtaatccggctcggtggtgatttcatccaccagctggctgaaaatcacattgtcattttcgtcaataaccacaacggcacgcgctgccagacctttcagtgggccatcagcaattgccacaccgtaagcttgcagaaattcagcgttacggaaagtggagagggtgataacgttgttcagaccttctgcgccgcagaaacgagactgggcgaacggcagatcggcagagatacacagcacaacggtgttgtcgatctcagttgccagttggttaaacttacgtacacttgcggcgcaaacaccggtatcaatactcgggaaaatgttcagcactttgcgtttacccgcaaactgaccgagggtgacgtcagacagatcttttgccacgagagtaaaagtctgcgctttgctacccgcctgcgggatggaattggcgactgtaaccgggttgccctggaaatgaacggtttgactcatgattatctttcctgtttacatatagttaacgtcacacctagtttatgctaactgtcaataacacagcaaacgctattacagggtctccttacaacaactgtcaacgcagtttgtaattaaaagattaacccatatctggtgaatgaaacagtgatgaaccttctgccagatcaataaatcagaaaaatttaatgatatgacagaaggatagtgagttatgcggaaaaatcaggcaacgttacgcgtatgaccggcaagctgggccagcgcatcgttattttcgatggtgatgtatttacctttgactgccagcatgccgcttttctggaagcgacccagcagacggctgatggtttctaccgtcaggcccagatagttaccgatatcgccacgagtcatcgtcaggcggaattcacgaggggagaagccgcgttgggcaaaacgacgggacaggttgtagatgaatgcagccagacgttcctcggcatttttcttgctcaacagcaggatcatgtcctgatcgcctttgatttcaccgctcatcagacgcatcatctgctgacgcagattcggcattttaccggacaaatcgtccagcgtttcgaacgggatttcacataccatgctggtttccagcgcctgcgcgaagctcgggtgatggccgctgccgatggcgtcaaatcccaccaggtcgcctgctaaatggaaaccagtgatttgctcgtcgccttgctcagtgatggtataacttttaatcgtaccggagcggatggcataaaggcttttaagttcatcaccagccttaaacagcgtctggcctttctgaataggcttcttccgctcaatgatattatcaagctgatcaagctcatgttcgttgagtgtgaacgggatgcaaagctggctgatgctgcaatcctggcaatggatagcacaaccgccagactgaatgcgccgtataattcgcttttccgggatcataggtctgctcaagccgtaattgatatttgtcaattttaacatctttttagggagcaagtaagtctaagcaaaccttaacagcagagaattccgatattagatgtaaatatatgtctatctatttgaaaacccttaagttgttaagggtaactttacataaaagtgtgaacaagctggcacaaattgtttaatgtttacagcaaaagataaccttcatggcgcaataaccactcttttcgctgaactccgcctgcatatccggtcatggtgccgtttcggccaataacccgatggcaaggtacgacgatgctgatgggattgcttccgtttgccgcaccaacggcacgcgccgcgccaggacggcccaattgctcagccagttggccgtaatgcattacctgcccgcaggggatagtgcgtagtgttttccagacttcgcgctgaaatggcgtcccccccgtagcagtgggaagcgtatcaataatgctaagattaccggcaaaatattcacgaagcttgtcgcttaaaccgcctggattggtggcagaaatgcgctcatagccttctttgcgataatggatgtccagcagctgcaccatgcgttcgctgtactcttcccattcaaccgcccgcaggcgaaattgctcatcgcaaatcacccacagtggacccagtggcgtggcaattttttcttcaagtaatctcagcatccgttctctcttaagacaaacgtgggtaaatacccggacctatcggcagaccgacaagataccacgccagcacatcgcagccatactatgcagaaacaatgctgtcgatggctgcttttgcgtcagactgtgctttcgctgccatttccggaccgtatgcgatcccttcggcgaagacaaatttcacatcggtaatgccgataaagccgaggaacgtggacagatacggcgtcaccaggtccgttggtccatctttgtggatcccgccgcggctggtaataacgatggcttttttacccgttaccagaccttccggaccgttctcggtatagcggaaagtaacgcctgcgcgggcaaccaggtcaaaatagtttttcaactgagtcgagatgttgaagttatacatcggtgccgcaataacgataacgtcgtgggctttcagctcggcaatcaactcatcggaaagtgccagagcttcctgctgacgcggagtcagcggcgcatcgctcggacgcagagcgccaaccagttcgccatccagtaccggaatcggatttgcagccaggtcgcgaacggtgatttcatcagcggagtgcttttcgcgccattgttcaacaaaataatcggacaactgattagactgagagtaccctgccaggatgctggatttaagaactaataccttgctcatggtgtttccttatagatgtttgaatgggcgatgccccgttgcttgttgacactttattcacaatcctgccacagagatagcgcaataaatcgaagcctatgttcgaatttattgaacaacgcatagaaagccgcgatgtggtactctatatctatcatttaaaagaaaattaatcaggcagactactgcccactaacgttatgacagaacaacaaaaattgacctttacggccttgcagcagcggctggattcgctgatgctgcgtgacagactgcgtttttctcgccgtctgcacggcgtgaagaaggttaaaaatcctgatgcacaacaggccattttccaggagatggcgaaagagattgaccaggcggcagggaaagtcctgctgcgtgaagcggcacgaccggaaattacttatcctgacaatttaccggttagtcagaaaaaacaggacattctcgaagcgattcgtgatcaccaggtggtgatcgtcgccggggaaacgggttctggtaaaacgactcagttaccgaaaatctgtatggagctggggcgcgggattaaaggactgatcggccatacccagccgcgtcgtctggcggcaagaacagtggcgagccgtattgcggaagagctgaaaacggagccgggcggttgcatcggttacaaagtgcgtttcagcgatcacgtaagtgataacacgatggtcaagctgatgaccgacggtatcctgctggcggagatccagcaagaccgcctgctgatgcagtacgacactatcattattgacgaagcgcacgaacgcagcctgaatatcgattttttgctcggctatttgaaagagttgctgccgcggcgtcctgacctaaaaatcattatcacttccgcgactatcgacccggaacgctttagccgccactttaataatgcgccgattattgaagtctccggtcggacctatccggtggaagtgcgctatcgcccgattgttgaagaagccgatgacaccgagcgcgatcagttgcaggcgatttttgacgccgtagacgaactgagtcaggaaagccatggcgacattctgatctttatgagcggcgagcgggaaatccgcgataccgccgatgcgctgaacaagctgaacttacgccataccgaaatcttgccgctttatgcgcggcttagcaacagcgaacaaaatagggtattccagagccacagcggacggcgcattgtgctggcgaccaacgtcgcggaaacgagcctgaccgtaccggggattaaatacgttatcgaccccggtacagcgcgtatcagccgctacagctatcgcaccaaagtgcagcgtttgccgattgagccgatttcccaggcgtctgccaatcagcgtaaaggccgctgtggtcgtgtgtccgaagggatctgtattcgtctctattccgaagacgatttcctcagccgcccggagtttaccgatccggagattctgcgtaccaacctggccagcgttattttgcagatgaccgcgctggggctgggcgatatcgctgcgttcccgtttgtcgaagcaccggataaacgcaatatccaggatggcgtgcgtctgctcgaagagctgggcgcgatcaccactgatgaacaggccagcgcctataaactgacgccgctcggtcgccagctcagccagttgcctgtcgacccacgtctggcgcgtatggtgctggaagcgcaaaaacatggctgcgtgcgtgaggcgatgattatcacgtccgcgctctccattcaggatccgcgcgaacgtccgatggacaaacagcaggcaagcgacgaaaaacatcgtcgcttccacgacaaagagtctgactttctcgcgtttgtgaatctgtggaattatcttggcgagcagcaaaaggcgctttcttccaacgccttccgtcgcctgtgtcgtaccgattatctcaactatctgcgcgtgcgcgaatggcaggatatctacacccagttgcgtcaggtggtgaaagaacttggcattccggttaacagcgaaccggcggagtatcgcgaaattcacattgcgttgctgaccggtttactttcccatatcggcatgaaagatgccgataaacaagaatataccggcgcacgtaacgcgcgtttctccatcttccccggttctggtttattcaaaaaaccgcctaaatgggtaatggtggcggaactggtagaaaccagccgcctgtgggggcgcattgctgcgcgtatcgacccggaatgggtggagccagttgctcagcatttgattaaacgcacctacagcgaaccgcactgggaacgggcgcagggcgcggtgatggcaacggaaaaagtcactgtttatggtttgccgattgttgccgcgcgcaaggtcaactacagccagatcgatccggcgttatgtcgtgaactctttattcgccacgcgctggtggaaggtgactggcagacgcgtcacgcattcttccgtgaaaacctgaaactacgggcggaagtagaagagctggaacacaaaagtcgtcgccgcgatattctggttgatgacgaaacgttgtttgagttctacgaccagcgcatcagccacgatgtaatctccgctcgccacttcgacagctggtggaaaaaagtcagccgcgaaacgcctgatttgctcaactttgaaaaaagcatgttgatcaaagagggcgcagaaaaaatcagcaagctggattacccgaacttctggcatcagggcaatctcaagctgcgtttgagctatcagtttgagcccggcgcggatgctgacggtgtgaccgtacatattccgctgccgttacttaaccaggttgaggaaagcgggtttgaatggcagatccccggtctgcgccgcgaactggtgattgctctgattaaaagcttgccgaaaccggtacgccgtaattttgtacccgcgccaaactatgccgaagcgtttttaggccgcgtcaaaccgctggagttaccgttgctcgacagccttgagcgcgagttacggcggatgaccggcgttaccgttgaccgcgaagactggcactgggatcaggtgcccgatcacctgaaaattaccttccgcgtggtggatgacaaaaacaagaagctaaaagaagggcgcagcctacaagatctgaaagatgcgctgaaaggcaaagtgcaggaaacgctatctgcggtggcggatgacggtatcgagcagagcggcttacatatctggagttttggtcagctgccggaaagctacgaacagaagcgtggcaactacaaagtgaaggcgtggccggcgctggtggatgagcgcgacagtgtggcgatcaaactgtttgataacccgctggagcaaaagcaggcaatgtggaacggtcttcgccgtctactgctgctgaatattccaagcccaatcaaatatttacatgaaaagttaccgaacaaagccaagctgggactgtactttaacccgtatggcaaagtgctggagctgatcgacgactgtatctcctgcggtgtggataaattgatcgacgccaatggtggcccggtctggacggaagaaggctttgctgcgctgcatgaaaaagtgcgtgccgaactgaacgacacggtggtggatattgcgaagcaggtcgagcaaatccttacggcagtgttcaatatcaacaaacgtctgaaagggcgggtggatatgaccatggcgctggggctttctgacattaaagcgcagatgggcgggttggtatatcgcggttttgtcactggtaacggcttcaaacggctgggcgacacgctgcgatatttgcaggcgattgaaaaacggctggaaaaactggcggttgatccacatcgcgaccgtgcgcagatgctgaaagtcgaaaacgtccagcaggcgtggcagcaatggatcaacaaactgccgcccgcacgtcgtgaggatgaagacgtgaaagagatccgttggatgatagaagagttgcgcgttagttacttcgctcaacaacttggtacgccttatccgattagtgataagcgtattttgcaggcgatggagcagattagcggttaaccctgctatttgcctgataaagaaaaaacccggtaagcatttagcgccgggttttttattaattctaaaacggtaagggtaaaaattcaggaattcagaaaaatacaattctctgctgcaagatgaataatgtttatctacagcatttccttaaaagatatgtcaggcttgcggagtggcggttaaggacatacgatttcctcctttcagagtgctccgcttctcactattatctcacgcagtattcttaagggaacgataaggaggaaccatgaacattaccccgtttccgacgcttagcccggcaactatagatgccataaatgttatcggacagtggctggcgcaggatgatttctccggtgaggtgccgtatcaggccgattgcgtgatccttgcaggcaatgcggttatgccgactatcgatgcggcatgtaagattgcccgcgatcagcaaattcctttactgattagtggtggtatcggtcacagcacaacttttttgtatagcgccatcgcacagcatccgcactacaacactatccgcaccactggcagagcagaagcgaccatcctggcggatatcgctcatcagttctggcacattccgcatgaaaaaatctggattgaagaccagagtacaaactgcggtgaaaacgcacgctttagcatcgcgctattgaatcaggccgtagaacgagttcatacggctatcgttgttcaggaccccaccatgcagcggcgcacgatggcgacgttccgccgtatgactggggacaatcccgatgcaccacgctggttaagttatcccggattcgttcctcagttaggaaataacgcagacagtgtaatctttattaatcagttacaaggattatggccagttgagcgttatctcagtctactcactggcgagctgccgcgtttacgcgatgatagcgatggctacggtccccgcgggcgagattttatcgttcacgttgattttccggcagaagtcatccatgcatggcaaacgctgaaacatgatgcggtgctcatcgaggcgatggaaagtcgcagcttacgttaaaaattgcccgtttgtgaaccacttgtttgcaaacgggcatgactcctgacttttatttctgccttttattccttttacacttgtttttatgaagcccttcacagaattgtcctttcacgattccgtctctctgatgattgatgttaattaacaatgtattcaccgaaaacaaacatataaatcacaggagtcgcccatgagtgtacccgttcaacatcctatgtatatcgatggacagtttgttacctggcgtggagacgcatggattgatgtggtaaaccctgctacagaggctgtcatttcccgcatacccgatggtcaggccgaggatgcccgtaaggcaatcgatgcagcagaacgtgcacaaccagaatgggaagcgttgcctgctattgaacgcgccagttggttgcgcaaaatctccgccgggatccgcgaacgcgccagtgaaatcagtgcgctgattgttgaagaagggggcaagatccagcagctggctgaagtcgaagtggcttttactgccgactatatcgattacatggcggagtgggcacggcgttacgagggcgagattattcaaagcgatcgtccaggagaaaatattcttttgtttaaacgtgcgcttggtgtgactaccggcattctgccgtggaacttcccgttcttcctcattgcccgcaaaatggctcccgctcttttgaccggtaataccatcgtcattaaacctagtgaatttacgccaaacaatgcgattgcattcgccaaaatcgtcgatgaaataggccttccgcgcggcgtgtttaaccttgtactggggcgtggtgaaaccgttgggcaagaactggcgggtaacccaaaggtcgcaatggtcagtatgacaggcagcgtctctgcaggtgagaagatcatggcgactgcggcgaaaaacatcaccaaagtgtgtctggaattggggggtaaagcaccagctatcgtaatggacgatgccgatcttgaactggcagtcaaagccatcgttgatagtcgcgtcattaatagtgggcaagtgtgtaactgtgcagaacgtgtttatgtacagaaaggcatttatgatcagttcgtcaatcggctgggtgaagcgatgcaggcggttcaatttggtaaccccgctgaacgcaacgacattgcgatggggccgttgattaacgccgcggcgctggaaagggtcgagcaaaaagtggcgcgcgcagtagaagaaggggcgagagtggcgttcggtggcaaagcggtagaggggaaaggatattattatccgccgacattgctgctggatgttcgccaggaaatgagcattatgcatgaggaaacctttggcccggtgctgccagttgtcgcatttgacacgctggaagatgctatcagtatggctaatgacagtgattacggcctgaccagtagtatctatacccaaaatctgaacgtcgcgatgaaagccattaaagggctgaagtttggtgaaacttacatcaaccgtgaaaacttcgaagctatgcaaggcttccacgccggatggcgtaaatccggtattggcggcgcagatggtaaacatggcttgcatgaatatctgcagacccaggtggtttatttacagtcttaatgagtgaaagaggcggaggttttttcctccgcctgtgcgcgtcagagtttagcgaatttttcgagggtgcgaataagctgtgtgacgaagccatattcgttatcgtaccaggcgaccgttttcaccagttgtaaatcgcccacggcggtaatttccgtttgcgtggcatcaaacaccgaaccgaaatggctgccaatgatatcggaagagactatttcttcatcggtataaccaaatgactcgttattggtggttgcttgtttaagtgcgttattcacctcttcggcagtcacttttttccgagaatcgataccagttcagtgaccgaacctgttttcaccggcacgcgttgcgcatgacctttcagtttgccgctcagttccgggatcaccagaccaatggcttttgccgcccccgtagtgtggggaatgatattttctgccgctgcgcgtgaagcacgtaaatctttaccacgcgggccatccaccagtgactgggtgccagtataggcatgaatggtcgtcatcgtgccgacttctatcccgaaactgtcatgcaaggctttggccatcggcgcaagacagttagtggtgcatgacgccacggaaacaatggtgtcgttgccatccagagtgtcgtcattgacgttataaacgatagttttcatttcaccggcaggggcggaaatcaacaccttcttcgcaccagcatcaagatgcgcctgcgatttctcggcggaggtataaaagccagtacattcgacaatgatttctgcacctttcgctttccacggaatatttttagcctctttttcggcgtaaaccgcgatacttttcccatcaacgataagtgaatcttccgtaaaatcaacgctccaggggaatggtccgtagtttgaatcatgtttcagcaggtaggcgagaatttatggggaagtgagatcattaatagcgacaacgtctatgttgcttttgacttcaagtaatcgacccaacaccagtcgaccgatacgaccaaaaccgttaataccaactttactcatggttttctcctgtcaggaacgttcggatgaaaattgatcctttccaagcttagaccaggatggcgggatgggcaatctccattctcacagtgaaacgtaacgtactgaaaacgggtgaacaatatttaatgaaattttgagaaaagcccgttatgttaacggaaaattatgttaaagcaggaaatgttatggaaaataaatatagtaggttacaaatcagcattcactggctggtctttttactggttatcgcagcgtattgcgcaatggagtttcgtggtttcttcccacgtagcgatcggccactcatcaacatgattcatgtttcctgtggcatcagtattctcgtgctgatggtcgttcgtcttttgttaaggctgaaatacccaaccccgccgattatacctaagccaaaaccgatgatgacgggactggcgcatttgggacatttggtgatttatctcctgtttattgcgctgccagtgattggtttggtgatgatgtataaccggggcaacccgtggtttgcgtttggtttgacgatgccttacgctagtgaggccaatttcgaacgggtagatagcttaaagagctggcatgaaacgctggcgaatctgggatattttgttatcgggttgcacgctgcggctgcactggcacaccactatttctggaaggacaacacacttctacgcatgatgccgcgtaaacgttcctgaaggatatttaaagaaaacgcctgtactaaaaccgacccgtggtacaggcgaagaatacgggtctacatcggaagcgcctattatatttatttgtatgataaataaaaccataatccttgcccatacgtccatctggcttatttttaatcaattcacccgatctttgatctcatcaacggtatcaaaataaaccagcgtataacgttcaaatcgaacataagattcgataaaccatggaggttatatgaaaaaactggcacttattttgtttatgggaacgcttgtttccttttatgccgatgccgggcgcaaaccctgttctggtagcaaaggggggatcagtcactgtacggcaggcggcaaatttgtctgtaatgatggttctattagtgcaagcaaaaaaacatgcactaactgaagtgtaaaaggggtgccatgagaaaatgaatctgctagtcaaatgcgcggggaaaatccccgcgcttgcccttacctggacgtgcaggccatgagcgcagcaacctccttatcaccgtcccggaaccgcagttcgtagagcgtttgtcgggtcaggagtgtgaatgtcagaatcgtaatgcagataatgagcagacacaccaccagagggttgtgcttcatagcctttctccttgccggatggcgggtaagaggctaagatctgaattgctaggttcattcgttggcctcggttgatagaaatatcggtcggggccttcgtctttctgattcccggttagcctgaaaacagaaagtctcaggcacccgcaggcatcctatgaggtttccttagggacgaaaataatcacttcacgaaattgcgtgctgttttccagaatttttcgtcattcgggttagccagtttagccattcgttactctcttcattccaatagcattaattttctatgcaataattgttgtaaaaatgtgacgcaaagaggtttttggtcataagtaattaccgtcaagtgccgatgactttctatcaggagtaaacctggacgagagacaacggtaatgaatacaactcccagtcagcgattaggttttttgcatcacatcaggttggttccgttatttgcctgcattctaggcggtatcttagttctattcgcattaagtagtgccctggctggctatttcctctggcaggccgatcgcgatcagcgtgatgttactgcggagattgagattcggaccgggttagcgaacagtagtgattttttgcgtagtgcccggatcaatatgattcaggccggggctgcgagtcgtattgcggaaatggaagcaatgaagcgaaatattgcgcaagccgaaagcgagattaaacagagccagcaaggttatcgtgcttatcagaatcgaccggtgaaaacacctgctgatgaagccctcgacactgaattaaatcaacgctttcaggcttatatcacgggtatgcaacctatgttgaaatatgccaaaaatggcatgtttgaagcgattatcaatcatgaaagtgagcagatccgaccgctggataatgcttataccgatattttgaacaaagccgttaagatacgtagcaccagagccaaccaactggcggaactggcccatcagcgcacccgcctgggtgggatgttcatgattggcgcgtttgtgcttgccctggtcatgacgctgataacatttatggtgctacgtcggatcgtcattcgtccactgcaacatgccgcacaacggattgaaaaaatcgccagtggcgatctgacgatgaatgatgaaccggcgggtcgtaatgaaatcggtcgcttaagtcgtcatttacagcaaatgcagcatagtctggggatgacagtagggactgttcgacagggcgcggaagagatttatcgtggcaccagcgaaattagtgctggcaatgcggacctgagttctcgcaccgaagaacaagcggcggctatcgaacaaactgccgccagcatggagcaactcactgcgacggtgaaacagaatgcggataacgcgcatcatgccagcaaactggcgcaagaggcttctattaaagccagcgatggcgggcagacggtttccggtgtagtaaaaacgatgggcgctatctccacgagtagcaagaaaatttctgagatcaccgccgtcatcaacagtattgctttccagacgaatattctggcactgaatgctgccgttgaagccgcgcgagcgggtgagcaagggcgtggatttgccgttgtcgccagcgaagtacggacactcgcaagtcgcagcgctcaggcggcgaaagagattgaaggcttgatcagtgaaagtgtcaggttaattgacctggggagcgatgaggtggcaacggccgggaaaaccatgagcactattgttgatgccgtcgcgagtgtcacacatatcatgcaggaaatcgccgccgccagcgatgaacaaagtagaggcataacgcaggttagccaggcgatttctgaaatggataaggtgacgcaacagaatgcttctctggtagaagaggccagtgcggcggcggtgtcccttgaagaacaggcggcacgattaactgaggcggtggatgtattccgtctgcacaaacattctgtgagcgcagaacctcgcggagcgggtgaaccagttagtttcgctacggtgtgaaaatgttcaaggagggatcgacagatcccttcacctttcagaacggcatactttttcgaatagcgttaatcatcaactggcaaccagaagagaacgtcgcatctacgcgggtcagtattccaatcggttcgcctgcaccatgtcccggaacaggcagggccaccagcgtggcatgacgcaggtcgtcttttacagcgccagaagggacaaaccacacgtaatcgtattcaaccgtaagttgacgagataggctagcagacagcgtttcgatacaaccgctaggaattttacagccctggctctgcactaatgcatcactatgctggcgtggcgcagtgccttctggacttacaacgaccggccattccagcacccggcttagcgttacgttctcctgaagtagcgggtgattagggcggacaaccagcttcaagctttcaagaaacagcagttcgtaattaagcccggtcatcagttcaggatcactcatccgaccaatgccgatatcgatttccccggtttttaaacccgccagaatcatagggttactcattgtcgcaacttgcaaggtcgtctctttttgttgctgatgaaactgacctataacgctaggtaatatccccagtgccgcagtaggtagtgcaccaaccctgacgacatcattattaagaccttctttacgatgaaggctccgtccggcagtgttgatggcgtcaagaactctgactgcatgcgttaaaaattgttcgccgggtaaggtaagttgcgccccctgacgaccacgctcaaacaagcgagcgccagtcagctgctccagttcattcaatgtcttagagagcgcaggttgactcaaattaagggtttcagccgcgcgccccaaagttccttgttgtgcgacagctacgaatgtatgaaggtggcgcaaacggatgcgctgactaaacagactatttttttccataagcgatgttaaaaacgaagcggtgtcgctgacaagtgaagttgtttgattatgataacttgattgcaaaatattattaacaattaaagcaattatgttacagcaaaatggataatattgatgttttcgcggcgagatcacagtttgtaaattcttcccgcaagagtgaatgcggttacctacactccagattactgaccactggaggcagacactatggcgaacagcatcacggcggatgagattcgggaacagtttagccaggcaatgagtgccatgtaccagcaagaagttccgcaatatggcacgctgctggaactggtagctgatgtgaatctggctgtgctggaaaacaatcctcaactgcacgaaaaaatggtaaatgcagacgagctggcgcgactgaatgttgaacgtcatggggcgattcgcgttgggactgcacaagagcttgctactcttcggcggatgtttgccattatggggatgtacccggtgagctattacgatctcagccaggcaggggtgccggtacatagcacagcatttcggcccattgatgatgcttctctggcgcgtaatcccttccgcgtttttacctccttactccgccttgagcttatcgagaacgaaattttgcgccagaaagcggcggagattctgcgtcagcgcgatatcttcaccccacgttgtcgacaactgttagaggaatatgagcagcagggcggctttaacgaaacacaggcacaggagtttgtgcaggaagccctggaaacgtttcgctggcaccagagtgcaacggtagatgaagaaacctatcgcgcattgcacaacgaacatcggttgattgctgatgtggtctgttttcctggatgccatatcaaccacctgacgccacgtacgctggatattgaccgggtgcagagcatgatgcctgaatgcggaattgaacccaaaattctcatcgaggggccgccgcgccgcgaggtaccgattttactacgccagaccagctttaaagcactggaagagacggtgttgtttgcggggcagaaacagggcacgcataccgcgcgctttggtgaaattgagcagcgtggcgtggcattaacgccgaaagggcgacaactgtatgatgatcttctgcgtaacgctggaaccgggcaggataatctcactcaccaaatgcatttacaggaaaccttccgcacttttcctgacagtgagtttttaatgcgtcagcaagggttggcatggttccggtaccgtctgacgcctagcggtgaggcgcatcgtcaggcgattcatcctggagacgatccacagcccttaattgaacgtggttgggtagtggcgcaacccatcacctatgaagatttcttgcccgttagcgcggcggggatcttccagagtaatctgggtaatgaaacgcagacacgcagtcacggtaatgccagtcgcgaagcatttgagcaggcgttgggttgtccggttttggatgagttccagctttaccaggaagcggaagaacgcagtaaacgtcgctgtggtttgctttaaaatctgaccatccgcctttgcaaaaatttgcctgattttacaaacgaatcaggctcatcccatcgacataaaaaaaatgccgatttatgcatattctctcagttcaacaattggattattaataaatattgtctagagtgagcggtcataaataagcactttcttgccgctgaaaacgaccagcgcgggaccattcacaacaccagaaggactcactttcaggtatggatcgtagacgatttattaaaggttcaatggctatggccgccgtgtgcggtaccagcggcattgcttctcttttttctcaggcggcattcgcggcagattctgatattgccgacgggcaaacccagcgttttgacttctccattctacagagtatggcgcacgacttagcgcaaacagcgtggcgtggtgcgcctcgtccgttacctgacacgctggcgacaatgacgccgcaggcttataacagtattcaatacgacgccgaaaaaagcctctggcataacgttgagaaccgtcaactggacgctcagttcttccatatgggaatgggattccgtcgccgcgttcgtatgttttctgtagatccagcaacacatctggcgcgtgaaattcactttcgcccggagttgttcaaatacaacgatgcaggtgttgatacaaaacaattagaagggcaaagcgatctcggctttgccggttttcgcgtgtttaaagcccccgaactggcgcgccgtgatgtagtaagttttctcggcgcgagttatttccgcgccgttgatgatacatatcaatacggtttgagcgcccgcggcctggcgatcgacacttacaccgacagtaaagaagagttccccgactttaccgccttctggtttgatacggtaaaaccgggggcaactacctttaccgtttatgcgttgctcgatagcgccagcattactggtgcctataagttcactatccattgtgagaaaagtcaggtgattatggatgtggaaaatcacctgtatgcgcgcaaagacattaaacagctgggcattgcgccgatgaccagtatgttcagctgcggtactaatgaacgtcggatgtgcgatacaattcatccgcaaattcatgactctgatcgtctgtccatgtggcggggcaacggcgagtggatttgccgtccgctgaataatccgcaaaaattgcagttcaatgcttacaccgacaacaacccgaaagggtttggtttattgcaactggatcgtgacttctcccattatcaggacattatgggctggtataacaaacgcccaagtctgtgggtggaaccgcgtaacaagtggggtaagggcaccatcggcctgatggaaatcccaacaacgggcgaaacgctggataacattgtctgcttctggcagccagaaaaagctgtaaaagcaggtgatgagtttgcattccagtatcgtctgtactggagtgcgcaaccgcctgttcattgcccattagcgcgcgttatggcgacgcgtaccggcatgggcggtttcagcgaaggttgggcgccaggtgaacactatcccgaaaaatgggcgcgtcgttttgccgtcgatttcgttggtggtgatctgaaagctgccgcgccaaaaggcattgagccggtgattacgctttccagtggggaagcgaagcaaatcgaaattctctatattgaacccatcgatggttatcgtattcagtttgactggtatccgactagcgactccactgatccggtcgatatgcggatgtatctacgttgtcagggggacgctatcagtgaaacatggctgtatcagtatttcccgccagcgccggataaacgtcagtatgttgacgaccgcgtgatgagttaatcgttttttcttcggcaccttcttcgggaggtgccgtctggttaaacacgatcccgctcgcatttttccctaagttaaatgagtaatctgatggtgtgtatttcagatacaccttgtcagccactaacagggagtgcgtatgtttccagaataccgagatttaatatcccgtctgaaaaacgaaaatcctcgctttatgtccttgttcgataaacacaataaacttgatcatgaaattgccagaaaggaaggttccgacggtcgagggtacaatgcggaagtggtccgcatgaaaaaacaaaagctacagttaaaagatgagatgctcaaaatcctgcagcaggagagcgtcaaagaggtgtaaactttcctaagccgccagccaggcggcttttttaacaactgcatggattgactggagataagatgactgaaacgataaaagtaagcgaaagtcttgaattacatgctgttgcagaaaatcacgtcaaacctctttatcagttaatctgtaaaaataaaacctggttacagcagagcctaaactggccgcagtttgttcaaagtgaagaggacacgcgaaaaacggtgcagggtaatgtgatgttgcatcaacgcggctatgccaaaatgttcatgattttcaaagaagatgaacttatcggcgttatcagctttaatcgtattgaaccactgaataaaaccgctgaaatgggctactggctggacgaatctcatcaggggcaggggatcatttctcaggcgctgcaggcattgattcatcattacgcccagtctggtgaacttagacgcttcgtgatcaaatgtcgggtggacaatccgcaaagcaaccaggtcgctttgcgcaatggttttatccttgaaggttgcctgaaacaggctgagttcctgaatgatgcctatgatgatgtgaacttatacgcgcgtattatcgatagtcaataatcacaataaccctgccagcggcgttcgcgtaatgcgctcctcgccgttaatgacttttggaccacggacatgaaccgtgtcgccatcaaaggcttcaacgacggcgtggtcggttaactccacatggttttcaattatcaccgcacctgtaatacggctctcaccttgtatgacaacgtgctcgtcgagcagaatcggtccgccacgtaccacggcatttccgccaaccaagacatgatgttttaacacacaattaccttccacaatggcatattccgccacctggctactgtaatgaatcgtcggaatggcatcttcttctatgccagctttcacctgcgcgtgaccgtagactttagcgcaatcgcatagccagacattgttctcttcattaccttcaatactggcaaaatcaaaaacttcggcgcgatgttcaataaaagcataccggacgacggcatcgccataaatttgtgcctggtggacaatacggctggcgctaacccttgcgcgatcataaatttggagcaggagttgatggtcgggcgttaagccttgtgcggcgacgatcatagaatgttgatcaattaaggcgtgaccaaatattctacattgcccgtaaactaaactgtcatgaatggtgacgctgtcacttatatatgcaccctggctgatttcactattatcgatccagacgttatccgttgcgtaaacctctccccacagcacgctggtgccggtgatacgcgtattaccggaaatcaccgctccgccgaacgcaatagcattctggtcgtaaatccagcaatttccttcttgtgctaacaccgtttcgcgatcgatccagccgccagcggttcctgctatcacatcgttaaaatcgctaatggcgataatctgccgtaataacacattttttttagtgccatcttcctgataactaaaggctcgctgttcttcacttagacgatatttgcgcatagcgttttcccacaggtgacttactataaccgtagcaaattctgcggctctggctatgctcgagaaaattccataaaatgcatttcaaatatactttataaattaaacaaaatgagtaagaagatgcagagcgataaagtgctcaatttgccggcaggctactttggtattgtgttggggacgatagggatgggatttgcctggcgctatgccagccaggtttggcaggtcagtcactggttaggggatgggctggtgattctggcgatgatcatctggggattattgactagcgcatttattgcccgactcatacgctttccgcatagcgtgctggcggaagttcgccatccagtgctgagcagttttgtgagtttgtttccggcaacgacgatgctggtggcgattggttttgttccgtggtttcgcccactggcggtgtgcctgttcagttttggtgtcgtggttcagttggcttatgccgcctggcaaactgcgggattatggcgcggatctcaccctgaagaagctaccacgcctggactgtatctgccgacagttgccaacaactttatcagcgcaatggcctgtggtgcgttgggctacaccgacgccggtctggtgtttttaggcgcaggcgttttcagttggctaagccttgaaccggtgatcttgcagcgtctgcgcagtagcggagaattacccacggcactgcggacaagtctcggcattcagctcgctcctgcgctggtggcttgtagtgcctggctgagcgtcaacggcggcgagggtgacacgctggcgaaaatgcttttcggttatggactgctgcaactgctgtttatgctacgtctgatgccatggtatctctcccagccatttaatgctagtttctggagtttcagcttcggcgtatctgcactggcaaccaccggtttgcatctggggagtggcagcgataatggatttttccatacgctggcggtgccgctgtttatctttaccaattttattattgcaatactgctcatccgtacttttgcgcttctgatgcagggaaaattgttagtcagaaccgagcgcgccgttttaatgaaagcagaggacaaagaatgatcattcgtgacgaaaactattttactgataaatatgaattaacccgcacacactctgaagtactggaagcggtgaaagtggttaaaccgggtaaaacgctggatctgggctgtggcaatggtcgtaacagtctttacctggcagccaatggttatgatgttgacgcatgggataaaaatgccatgagtatcgccaacgtcgagcgcattaaatccattgaaaatctggataatttacacacccgagtcgttgatctgaataacctcacatttgatagacagtacgattttattcttagcactgtggtgctgatgttccttgaggctaaaaccatccccgggttgattgccaatatgcaacgttgcactaaacctggtggttacaacctgattgtggcggcgatggataccgctgattatccatgtaccgtcggcttcccgtttgccttcaaagagggagaattacgtcgatattacgaaggctgggagagggtgaaatacaatgaagacgtcggcgagctgcaccgcaccgacgccaacggtaatcgtattaaactgcgtttcgccacgatgctggcacgtaaaaaatgacccggtaagcacaaaacgcgtgaaaattccccacgctgagatgatttactgttcttcttttcggtaagcatattttttatcgaagggatgtgaaattaatcacagtagtcgaagtttttagcagcttaacttactgaaatttaagtactgatgattgacttagcccctttttcggcattgactatgtcgtctgaaaaggggctgaaaaatttattttcaccaacactttttttgccacaacacgaagcggcgctttttgctataacttagaaagtaatataatcatctcaggaaactattcatgcgtaccacaagttttgcgaaagttgcagctttatgcggcttattggctctgtctggttgtgcatctaaaatcacccagccagataaatattctggttttttaaacaattactctgatttaaaagaaacaaccagcgctacaggtaaacctgttttacgttgggtagacccgagttttgatcaaagcaaatatgacagcatcgtctggaacccaatcacttattatccggtaccgaaaccgagcacccaggtagggcagaaagttctggataaaattttgaactataccaacaccgaaatgaaagaagcgatagcgcagcgtaaaccactggttaccaccgctgggccgcgtagtctgattttccgtggggccattaccggtgtagataccagcaaagaagggctgcaattctatgaagtggttcctgttgcattagtggttgcggggacgcaaatggctacaggccaccgtaccatggatactcgcctctattttgaaggtgagctgattgatgcagcgactaataaaccggttatcaaagtcgttcgtcagggcgaaggtaaagacctgaataacgaaagtacgccaatggctttcgaaaatattaaacaagttattgatgacatggcgaccgatgccaccatgtttgacgttaacaaaaagtaattccagacgcgccatcgttagatggcgctttttatccggtgcgccgtaaaaccccatccttcagggcggggatataaggcgcggttttccacctgaccaggtgtttgctgttgttcaatgtattggcggatgacggatattggcgcacctccgcagctactggcaaaatagccaggactccacaaaacgcctttgtagtaatacctgaatgcaatatctggtcgatctcgtcgcagtcacctacccgatacgcctttgaggctgtttaccagactggatatcgccagtttgggaggatagttaattaacaaatggacgtgatctggttcgccatccatttcaaccagttcagcttcaaaatcagcacatacatttgaaaagtaagtgcgtagtttttctgtcgcgtcatggtcaaaaatctggcgtcggtatctggtgacaaagagcaggtgaacatgcatcaggaaaacacaatgccttccacgccggatatcggtttcttttttcacagaccaaagtatcatttgacctgtgaaacgattacaggcatttaaattccagttaagacccggtggtcaacaggagtgtgaaatgaggcgcttcgcaggcgcatgtcgtttcgttttcaatcgtgctctggcacgtcagaatgagaatcatgaggccggtaataaatacatcccttacgggaaaatggcttcctggctggttgagtggaaaaatgccactgaaacgcaatggcttaaagattctcccagtcagccattgcaacagagtctgaaagaccttgagcgggcttacaaaaacttcttccggaagcgggctgcttttccccgattcaaaaagcggggacagaatgatgcattccgctacccgcagggcgttaagctcgatcaggaaaacagccgtatttttctgccgaaactgggctggatgcgctaccggaacagccgtcaggtcacgggtgttgtgaaaaatgtcactgtcagccagtcctgcggtaagtggtacatcagtattcagacagaaagtgaagtaagtactccggttcaccctagtgcaagtatggtcgggctggatgctggcgtggctaaactcgccacgctgagtgatggcacagtctttgagcctgtaaacagttttcagaaaaaccagaagaagctggcgagacttcagcgacagttaagccgcaaggtcaaattcagcaacaactggcaaaagcagaaacgcaaaatacagcgactgcattcctgtatcgcaaatatccgcagggactaccttcacaaagtcacaacggccgtcagcaaaaaccacgcaatgatagtcattgaggatttgaaggtcagcaacatgagtaagagtgcagcgggtacggtcagccagccggggcgcaatgtccgggcaaaaagtggtttaaaccgtagcatactggatcagggctggtatgaaatgcgccgccagcttgcgtataagcagctctggcgtggcggtcaggtgcttgctgttccgccagcgtatacaagccagcgttgcgcgtactgtggtcatacagcgaaagagaaccgcctgagtcaaagtaaattcagatgccaggtatgtggatatacagcgaacgccgatgtaaatggcgctcgcaacattttagcggcggggcacgccgttcttgcctgtggagagatggtgcagagtggccgcccgttgaagcaggaacccaccgaaatgattcaggcgacagcctgaacgtagcagggatccacgtccttcagggcgtggaggatgtcaatatcggtttctgtcagcgattaaattcaacaccacgtaacaaacgcctccggcaattaatccccaaaacgcagaaccaatcccgaccagcgtcaatccacttgccgttaccagaaatgccaccaccgccgcgtctcgctcacgctcattatgcagcgcctgatacaaactgccgccgatggtacttaacagcgccagacctgccagcatctggatccaacttacgggcagggcagccatcatcccggtaatggcactaccaaacagacctgcgagcaaatagaaaatgcctgcaacggcagcggccagccaacgttgatctttatccggatgcgcttccgggctttggcaaatagccgcggtgattgccgcaataccgacggaataaacgccgaaaggggaaaaaaccagtgccagcaatccagtaaatacaattaatgggctaacaggagcgctatatccagctgctttcattgctgcgatacccggtgcgttttggcttgccatcgtcaccagaaaaagggggagtgcaacgctcaggctgtgagcaaagctaaaatcaggggtaatataagtggggagaacgggtttaaagacaacatcagttgtgacaacgtcaccttgcgcgatgacgatcacgatcccaataatcatcgcggcaattaccgcatagcgcggcgcaacggccttggttgccagccataccagcaacatacttccacacaacgtaaattgaccgtccagactggcaaacgcctgtaaaccaaagcgtaataaaatcccggcaagcattgccgccgcaaggctgtgcggaataatgcgcatcagacgagcaaagagtcccgttatgccgcagaggactattagcgcgttggtgacaataaaaacgccgatggcttcgttaagtgttagtccctgcaatccggtgaccaacaaagccgcgccaggcgtactccatgcggtgagaacaggtacgcgataccataatgtcagagtcagcgtactgacgcccattgccagccccagcgccgtcatccagccagagatttgtgcagtggtggctccggcgacaatcgctgcttgccagattattgccgcactactggcgtagccaattaataccgccagaaaccccgccagtagcgtgggtggaggaatagaaaacagacgcatagtcacctcgtgcgttatagcgtacaggcaccgtagcatttgtccgttataacgcacaagtgataaacttccgttttgccggaggagtcgcatggaaaatctcgctcgctttttatccaccacacttaaacaactacgccagcagcgcggctggagtcttagccgactggcagaagcgacgggcgtttctaaagcaatgttagggcagattgagcgtaatgagtccagtccgacggtcgcgacattatggaaaattgccaccgggttgaacgtaccatttagtacatttatttctccgccgcagtccgctacgcctagtgtttatgatccacaacagtaggcgatggtgatcactagcctgtttccttatgatccacaactctgctttgaacacttcagcattcagatggcatctggtgcaataagcgaaagcacgccccatgagaagggggtaatcgaacatgtcgtcgtcattgatggacaacttgatctgtgcgttgatggggaatggcagacccttaattgtggggaaggcgttcgatttgctgcagacgtcacgcatatctatcgtaatggtggggagcaaaccgtacattttcattccctcatccattacccgcgcagttaagcgggaaaactatttcgcaacgtcgcgcttgtggctaaaatagccgccatttttcagctactggataagaatgtgaccgtatcttctcatcgacttgaactgttaagcccggcacgcgatgccgccattgcccgcgaagctattttgcacggtgccgatgctgtttatatcggcggccctggttttggtgcccgtcataatgccagtaatagcttgaaagatattgccgagctggtgccgtttgcccatcgttatggtgcaaaaattttcgtcacgcttaacaccattttgcatgatgatgagctggaacccgcgcaacggctgattactgacctctaccagaccggtgtcgatgcgctgattgttcaggatatggggattctggaacttgatattccgccgattgaactgcacgccagtacgcagtgcgacattcgtacagttgaaaaagcgaagttcctctctgatgttggcttcacgcagattgtgctggcgcgagagctgaatcttgatcagatccgcgcgattcaccaggctacggacgcgaccattgaattctttattcatggggcactgtgcgtggcctatagcggtcagtgctacatttctcatgcgcaaacagggcgtagcgccaaccgtggcgattgcagccaggcgtgccgtttgccatacacattgaaagacgatcaggggcgggtggtttcctatgaaaaacatctgctgagcatgaaagataacgatcagactgccaacctcggcgcgctgattgatgctggtgtacgctccttcaagattgaagggcgttacaaagatatgagctacgtgaagaatatcaccgcccattatcgccagatgcttgatgccattattgaagaacgtggcgatctggcgcgcgctagtagtggtcgtactgaacatttctttgttccaagcacggaaaagactttccaccgtggtagcacagattattttgtgaatgcccgtaaaggcgatattggcgcgttcgatagcccgaaatttatcggcctgccggtaggcgaagtagtgaaagtggcgaaagatcatctcgatgttgccgttaccgagccactggcaaatggcgatggcctgaacgtgttgattaaacgtgaagtcgtcggttttcgtgccaatacggtcgagaaaaccggagaaaatcagtaccgcgtctggcccaatgaaatgccagcagatttgcacaaaattcgtccacatcacccactaaaccgtaatcttgatcataactggcagcaggcactgacaaaaacctccagcgaacgtcgggtggcggtagacattgaactgggcggctggcaggaacaactgattctgaccctcaccagtgaagagggtgtcagcatcacgcatacgctggacgggcagttcgacgaagccaataacgccgaaaaagcaatgaacaatctgaaggatggtctggcaaaactggggcaaaccctctattacgcccgcgatgtgcaaattaatttgccgggggcgctgtttgtaccaaacagtctgttaaaccagttccgccgtgaagctgctgacatgctggatgctgcgcgtcttgccagttaccagcgcggcagccgtaaaccggttgctgatcctgcgccggtttatccgcaaacgcatctgagtttcctcgcgaacgtatacaaccagaaagcgcgtgaattttatcatcgctatggtgtgcagctgattgacgcggcgtatgaagcacatgaagagaagggcgaagtcccggtgatgatcaccaagcattgtctgcgctttgcctttaatctgtgcccgaaacaggcgaaaggcaatatcaaaagctggaaggcgacgccaatgcaactggttaacggcgatgaagtattaacgctaaagtttgattgccgcccatgcgagatgcacgtcattggcaaaatcaaaaatcacatactgaaaatgccgttaccgggaagcgtagtggcatccgtaagtccggatgagctgctgaaaacattgccgaagcgaaaagggtaaaacgccagttttctggttactcacaacttattgaatctgcatgatattgcctgccgggtaaggcgttacgccgcatccggcatcaaatgactcaacgttgtcccgcttctggtttgcggcttttttgccagtaaaaatgctcgcgcaaaccttccgcgctctcttccgccacagcacgcaattcatcgctgtccgcttcatgacgcagctgatgatccacattctttacccacacaaattcatgtcctttgtgccctgccatgagttgtccactaaacagagcacacgttaataagacaacgcttaacgccttcgtaaacatcctgccacctttttcttaccttttgccgctatgatgccgatcgtttcttgaggttattattcagttttgcaaattagcgcaaagaaattctggaatcttccttcctgattttgcattgcattctgccgttgcggcgatttagtgctattttcgagcaaattacacacggaggtaaacactaatgtttactttgttgatatactcagcggcagggaggcgatgtgaaacaaagcgagttcagacgttggctcgaatctcagggcgtcgatgtagcgaatggcagcaaccatttgaaactcaggtttcatgggaggcgcagtgtcatgccgcgtcacccctgcgatgagattaaagaaccattgcgtaaagcaatcctgaaacaactcggtttgagttaatcgccaattaaaaaggttaatgacatgcgagagacagtcgaaattatgcgttatcccgtcactcttacacccgcgccggaaggcggttatatggtttcttttgtggatatccctgaagcgttgacccagggcgaaactgtcgctgaagcgatggaagcggcaaaagatgctttactgaccgcatttgatttttattttgaagataacgagcttatccctttacctagcccattaaatagtcacgatcactttattgaagtacctttgagcgtcgcctctaaggtattgctgttaaatgcttttttacagagtgaaatcactcagcaagagttagccaggcgaattggcaaacctaaacaggagattactcgcctatttaacttgcatcatgcgacaaaaatcgacgccgtccagctcgcggcaaaggcgcttggcaaagagttaagcctggtgatggtttaattacagttaacgaaaagttgtcatttttaacaactgatatagactgccgaatcatctgcacataattacgattcgataatgaaaaaataccagcagcttgcagaacaattacgcgagcagattgcgagcggtatctggcaacccggcgatcgtttgcctagcttgcgtgaccaggtggcgcttagtggcatgagctttatgactgtcagccatgcctatcagttgctcgaaagtcagggatatattatcgcacgaccgcagagcggttattacgttgcgccacaggcaataaaaatgccgaaagcgccagtcattccagtcactcgagatgaagcagtcgatatcaacacttatatttttgatatgttgcaggccagtcgcgatccgagcgtcgttccgtttgccagcgcctttcccgacccgcgacttttccccctccaacaactaaaccgcagcctggcgcaggtaagcaaaaccgccacagcgatgagcgtgattgaaaacttaccgccaggaaacgcagaactgcgtcaggctattgctcgtcgctatgccttacagggcatcaccatttctcctgatgaaattgtcattactgccggggcgttagaggcattaaacctcagtttgcaagcggtaactgaaccgggcgattgggtgatagtagagaatccttgtttctacggtgcgttgcaggcgctggagcggctacggctgaaggcgttaagcgtggcgacggatgttaaagaagggatagatcttcaggcgctggaactggcgttgcaggagtatccggtgaaagcgtgctggctgatgactaatagccagaatccactcggatttaccttaacgccgcaaaaaaaagcacaactggtggcgttgctcaatcagtacaacgtaacgctgattgaagatgacgtttacagcgaactttattttggacgggaaaaaccgctgcctgcgaaagcgtgggatcgccacgatggcgttttgcattgctctagctttagcaaatgtctggtgcctggttttcgtattggttgggtcgccgccggaaaacatgcacgtaaaattcaacgcttgcagttgatgagtacgctttccaccagcagtccgatgcaacttgcgctggtggattacctttccacgcgccgatacgacgcccatcttcgtcgcctgcgtcgccagcttgcggaacgtaaacaacgtgcctggcaggcactgctgcgttatctgcctgcggaagtgaaaattcatcataatgacagtggttactttctctggttggagctccccgagccgttagatgccggcgaattaagcctggcggcactgacgcatcatatcagtattgcgccgggtaaaatgttttctaccggtgaaaactggagtcgttttttccgttttaataccgcgtggcagtggggagagcgtgaagaacaggcggtaaaacaattaggcaaacttattcaagaacggctgtaatagcgtttaatttaattcctcttagattgggtaatatgaatttcgaatagcagtcatatttcctaactccttgactatactccagaagataaccttacagacggcataatgcgcggtagctcacaacctgaataaattttctcaggggcgaaggtgtgcctgcaagccgccgtctatggttaaacaaggagatatttttacggcacggcggctgaacaattaattacgacaggagtaagaccttatgagcaagacatttgcccgcagcagcctgtgtgcgctcagcatgacaataatgaccgctcacgccgccgaaccgcctaccaatttagataaaccggaagggcgactggatattatcgcctggccgggatacatcgaacgcggacaaactgataaacaatacgactgggtaacgcagttcgaaaaagagacaggctgcgcggtgaatgtgaaaaccgccgcgacttccgatgaaatggtcagtctgatgaccaaagggggttacgatctggttacggcatccggcgatgccagcctgcgtttgattatgggtaaacgcgtgcagccgattaataccgcattgattcccaactggaaaacgctcgatccgcgcgtggttaaaggcgactggtttaatgttggcggcaaagtttacggcacaccttaccaatgggggccgaacctgctgatgtacaacactaaaaccttcccgacgccgccggatagctggcaagtggtttttgttgagcaaaatctgccggacggcaagagcaataaaggccgcgttcaggcttatgatggccctatctatattgcggacgctgcgttgttcgttaaagccactcagccgcagttgggcatcagcgatccgtatcaactcaccgaagaacagtaccaggcggtgctgaaagtgctgcgcgctcaacacagtttgatccatcgctactggcatgacactaccgtgcaaatgagcgatttcaaaaacgagggtgtggttgcttccagtgcctggccctatcaggccaacgccctgaaagccgaaggccagcctgttgctaccgttttcccgaaggagggtgttaccggttgggctgataccaccatgctgcatagcgaagcgaaacatccggtttgcgcctacaaatggatgaactggagtttaacgccaaaagtgcagggcgatgtggcggcctggtttggcagcttaccggtagtgccggaagggtgtaaagccagtccgttattaggcgaaaaaggttgtgaaaccaacggttttaactatttcgacaaaatcgccttctggaaaacgcctatagcagaagggggcaagtttgttccctacagtcgctggacgcaggattacattgccattatgggcggtcgctaacttcgctggggtgctttatgacgtacgcagtggagtttgacaacgtcagccggttgtacggtgacgtgcgcgcagtagatggcgtcagtattgcgataaaagatggtgagttcttctctatgctggggccgtccggctccggcaaaaccacctgcctgcgcctgattgctggcttcgaacagctttccggcggggctatctctatctttggtaaacccgccagcaatctgccaccgtgggagcgggacgtgaatactgtctttcaggactacgcgctatttccgcatatgagcattcttgacaatgtcgcctatgggctgatggtcaaaggcgtgaataaaaagcagcggcacgcaatggcgcaagaggcgctggagaaagtggcgttggggtttgtacatcaacgtaaaccgagtcaactttctggtggtcagcgccagcgggttgctatcgccagagcattggtgaatgaaccgcgcgtattgctgttggatgaaccgctcggcgcactggatctcaaattgcgtgagcagatgcagctggaactgaaaaaactgcaacagtctctcggtatcacttttatcttcgttacccacgatcagggcgaagcgttaagcatgtccgatcgtgtggcggttttcaataatggacgcattgagcaggtcgattccccgcgcgatctctatatgcgcccgcgcacgccgtttgttgccgggttcgttggtacaagcaatgtttttgatggactgatggcagagaaactttgtggcatgacgggaagcttcgccctgcgaccggaacatatccgcctcaacacccctggtgaactgcaggccaatggcacgatccaggcggtgcaatatcagggcgcggcaactcgttttgaactgaaattgaacggcggtgaaaaactgcttgtgagtcaggccaatatgacaggcgaagaactgcctgccacgctcacgcccggacaacaggtgatggtttcctggagccgtgatgtgatggtgccgctggttgaggagaggtgaatggcgatgaatgtattgcaaagtcctagtcgtccaggtctgggtaaggtgtccggtttcttctggcataatccggggctggggctgtttttactgctgcttggcccgctaatgtggtttggcattgtctatttcggcagcctgctgacactgttatggcagggattttatacttttgacgatttcaccatgagcgtaacgccggaactgacgctggcgaatatccgtgcgctgtttaatccggcgaattacgacatcattctccgcacgctgactatggctgtggcagtcactatcgccagcgccattctggcttttccaatggcgtggtatatggcgcgctataccagcgggaaaatgaaagcgtttttttatattgcggtaatgttgccgatgtgggcgagctacattgttaaagcctatgcctggacgttattgctggcaaaagatggcgtggctcagtggtttttacaacatcttgggctggaaccactgctgactgcgttccttacattacctgcggtgggcggaaatacgctgagtacttccgggctggggcgctttctggtgtttctctatatctggttgccgttcatgatcctgcccgttcaggcggcgcttgagcgtttgccgccgagtttgttgcaggcgagcgctgatctcggcgcacgtccacgacaaacctttcgctatgtggtgctgccgctggcaatcccgggtattgccgctggctctatctttaccttcagtctcacactgggcgattttatcgtcccgcagctggttggtcctccaggatattttatcggcaatatggtttattcccagcagggggcgattggcaatatgccgatggcggcggcattcaccctggtgccgattattctcatcgcactgtacctggcgttcgtgaaacgtctgggagcgttcgatgcactctgaacgcgcaccgtttttcctcaaactggcggcctggggcggcgttgttttcctacattttcccatcctgataatcgccgcctatgcgtttaacactgaagatgcggcgtttagttttccaccgcagggcctgacgctgcgctggtttagcgtggcagcacagcgtagtgatattcttgatgccgtgacactgagtcttaaagtggcggcgctggcgacattaattgcgctggtgttagggacgctggcagctgccgcgctgtggcgacgagactttttcggcaaaaacgccattagcctgttactgctgctgcccattgcgctgccgggcattgtcactggtctggcgttattaaccgcctttaaaaccatcaatctggagccgggatttttcaccatcgtggtcggtcatgcgactttttgtgtagttgtggtgtttaacaatgtcatcgcccgttttcgccgcacctcctggagtctggttgaggcgagtatggatcttggggccaatggctggcaaaccttccgctacgtagtgttgccgaatctcagtagcgcgttactggcaggaggaatgctggcgtttgccttgagcttcgatgaaatcatcgttacgacctttacggcaggtcatgaacgaacgttaccgttgtggttgctcaatcagcttgggcgaccgcgtgatgtaccggtaactaacgtggtggcactgctggttatgttggtaacaaccttgccgatcctgggggcctggtggctaacccgcgaaggcgacaatggtcaataaccactgatacaggaatatgctatgcaacataagttactgattaacggagaactggttagcggcgaaggggaaaaacagcctgtctataatccggcaacgggggacgttttactggaaattgccgaggcatccgcagagcaggtcgatgctgctgtgcgcgcggcagatgcagcatttgccgaatgggggcaaaccacgccgaaagtgcgtgcggaatgtctgctgaaactggctgatgttatcgaagaaaatggtcaggtttttgccgaactggagtcccgtaattgtggcaaaccgctgcatagtgcgttcaatgatgaaatcccggcgattgtcgatgtttttcgctttttcgcgggtgcggcgcgctgtctgaatggtctggcggcaggtgaatatcttgaaggtcatactagcatgatccgtcgcgatccgttgggggtcgtggcttctatcgcaccgtggaattatccgctgatgatggccgcgtggaaacttgctccggcgctggcggcagggaactgcgtagtgcttaaaccaagtgaaattaccccgctgaccgcgttgaagttggcagagctggcgaaagatatcttcccggcaggcgtgattaacatactgtttggcagaggcaaaacggtgggtgatccgctgaccggtcatcccaaagtgcggatggtgagcctgacgggctctatcgccaccggcgagcacatcatcagccataccgcgagctccattaagcgtactcatatggaacttggtggcaaagcgccagtgattgtttttgatgatgcggatattgaagcagtggtcgaaggtgtacgtacatttggctattacaatgctggacaggattgtactgcggcttgtcggatctacgcgcaaaaaggcatttacgatacgctggtggaaaaactgggtgctgcggtggcaacgttaaaatctggtgcgccagatgacgagtctacggagcttggacctttaagcagcctggcgcatctcgaacgcgtcggcaaggcagtagaagaggcgaaagcgacagggcacatcaaagtgatcactggcggtgaaaagcgcaagggtaatggctattactatgcgccgacgctgctggctggcgcattacaggacgatgccatcgtgcaaaaagaggtatttggtccagtagtgagtgttacgcccttcgacaacgaagaacaggtggtgaactgggcgaatgacagccagtacggacttgcatctagcgtatggacgaaagatgtgggcagggcgcatcgcgtcagcgcacggctgcaatatggttgtacctgggtcaatacccatttcatgctggtaagtgaaatgccgcacggtgggcagaaactttctggttacggcaaggatatgagtctttatgggctggaggattacaccgtcgtccgccacgtcatggttaaacattaaggataatattgcagatcgtaagagtatgagatgatcttgcgtactgtcagagcactgatttctctgacagtacgtgctgcgtgcaaaatcactacatcaaataaaccagccaaatctcatagagataagagtaaacaaaccaacagcagcaaagaaatttatcagtactacagttctactggaaacattcatttttgccaccttttatcattgcccctatgtgtatagtacgggttaagaaaatccgcaataatactcattctgaagatggataagggcaagttgctgtttgatgattttttctcaaactggtgaaaaaacttgatgcacgtcaaaaaatgacgcatatttgcgcgcgttttattcatctggctggacgcccgtacatgtctctctatcaacacatgcttgttttttatgcggttatggcagcaatcgcatttcttatcacctggtttctttctcacgataagaaacgcatccgtttcttaagcgcctttctggtgggggcaacatggccgatgagtttcccggtggcgctgttgtttagtctgttttaaatcttactcactggcttgacggcaccacgcagacttatatcatttggatgaatcgataaatttcacaagtggctaaggagaaagtatgagccatctggatgaagtcatcgcgcgcgtggatgccgcgattgaagagagcgtcattgcccatatgaacgaattattaatcgccctgagcgatgacgcggagttaagtcgggaagatcgctacacccagcagcaacgtctgcgcacagcgatcgcccatcacggtcgcaagcataaagaagatatggaagcgcgccacgaacagttaaccaaaggcggcaccatcctctgattaaaaactgcgtctggctaccaaccaggcgccaaccacaagtaaaattgcgccacaaattgggccgaacaacgcccgtagtggtacgccatgactgcggaagatatccagcatcagaccgccaatcagctgactggcgaccagtacagcaatagttgtcgccgctcccacattctgatatccgctgatactggcgaagacaaaaaagcttcccagcaagccaggtataagtgtccaccagcgcacgctggacaccagttcgccaaaccccgccatgccttgtttaaaccataaaatagaaacaaagagcacaatccccaccagactgttcagcaacatggcgatgagaatggtagaggaggtctgggtgatgcgcaccatcagcgtgttctggacaaccagaccaattccggcggcaatcaaaaaagcaagggtgaggctctgattcatccaatcgcgtccggttcagtgcgctcgtcgagttgcaactgcataaatgtcagatccagccaacgaccaaatttagtgcctacctgcggcatttgcgcggtgacgacaaatcccaggctctggtggagatgcaggctggcctgattttggctttcgatcccggcgaccatgacatgcttcccgcaatcccgcgcttcatcaatcaatcggcttaacaatttacgccccagacctttgccctgatgatcgggatggacataaacgctatgttccacggtatggcgaaaaccatcgaaactacgccagtcgccaaagctggcatatcccgtcactacgccgttttcctcgctcaccagcactggataacctgctaaagtccgcgcttcaaaccaggcaatgcggttatcagcatccaccgtttggtcattccagatagccgccgtatacaacacggcgtggttataaatttccgcaatggcagcacagtcggctttgcgggcaaaacggatggacatgtctggcctcaataaaataatgatgatgatgttatcaatactatcgaaaacagcccgaagcaacggattcctcgatgaaattattgcgtgttgcagaggggatgtgacggctgcaaacaaaaccaatcccgtgagcctgctactattgatggattcatgccaaaagcacaggagagcattatggggcaacaaaagcagcgtaatcgacgttgggttctggccagccgtccacatggcgcacctgttccggagaatttccgtcttgaagaagatgatgtcgccacaccgggtgaaggacaggtgttactgcgcacagtttatttgtccctggacccgtatatgcgtggacgtatgagcgatgagccatcttatagtccgcctgttgatattggcggcgtgatggtcggcggtacggtgagccgtgtcgtggagagcaatcatcctgattatcagtctggcgactgggtgctgggctacagtggatggcaagactatgacatatccagtggtgatgatctggtgaaacttggcgatcatccgcaaaatccaagctggagcctgggtgtgctagggatgccaggctttaccgcttatatgggcctactggatatcggtcagcctaaagagggcgaaacgttggtggtagctgcggcgacaggaccagtgggggcgacggtggggcaaatcggcaaacttaaaggttgcagagtggtgggggtagccggtggcgcggaaaaatgccgccatgctaccgaggtgttaggcttcgatgtttgtcttgatcaccacgcggatgattttgccgaacaactggcgaaagcgtgcccaaaaggtattgatatctattatgaaaacgtgggcggtaaggtattcgatgcggtgctaccgttacttaatacatctgcgcgcattcccgtctgcggattagtgagcagctataacgctacagagctaccacccggtccggatcgtttacctctgttgatggctacagtgctgaaaaaacgtattcgcttgcaaggttttattatcgctcaggattatggtcaccgcatccatgagtttcagagggagatggggcaatgggtgaaagaggataaaatccactaccgcgaagaaattactgacggtttagagaatgcgccacagacgtttatcggcctgctgaagggtaaaaacttcggcaaagtggtgatccgcgtggcgggtgatgattaaagtttcaacggcggcgtaagccgccataaaaatccaggcaaaaagcttattttcagctttaattaactaaccacatcattgttctgctgctaataacaacaaaggtgagtggtttatgattattcactttaatacaccaggtgaattccttctgccatgcaggcagggttggacagaaaacacgcgaaggaattaaaatgcctggaacgggaaaaatgaaacatgtcagtttgactctgcaggttgagaacgacctgaaacatcagcttagtattggcgcattaaaacctggcgcacgcctgattactaaaaatctggcggagcaattaggtatgagtattacacctgtgcgtgaagcattattacgtctggttagcgtgaatgcgctttctgtcgcacctgcacaagcatttacagttccggaagtggggaaacgtcaattagacgaaatcaatcggatccgctacgaactggaattaatggcagttgctctggctgttgaaaacctcaccccgcaagaccttgcggaactccaggaattgctcgagaaattacagcaggcgcaagaaaagggcgacatggaacaaatcattaatgtaaacaggctatttcgcttagcgatttatcatcgcagtaatatgcccatcctgtgtgagatgattgagcaactgtgggtcaggatggggcctggtttacattatctctatgaagcgattaatccagcggaattacgggagcatatagaaaactatcatctgttactcgctgcgttaaaagcaaaagacaaagagggatgcagacattgtcttgctgaaattatgcaacaaaatattgctattttataccagcaatacaatcgttaaagtaaatgcccggcaaataccgggcatcaaggtaattactcaaatctccacgcaatattcatgccgacaccataatttcgtccggggctaggttcgtaatatcgcccgttactctcattgacaatgacagaaccaacgtattctttatcgaataaattatcgacacgaccaaataaatccacagttaaattgtggtaattgtatttatacccggtgaataagccgacgagagtataagacggcgcttttgccgtattttcatcatctgccataatatcgcccatataacgcgcttccgtgcctgcataccaaccatcttccggtacataacctatgctcgcaaagcccatattacgggcgatccctggcatccgattaccgttacaatcctgttcattgcaaacattgctgcgataggtcgcatcaagccaggtccaggacgcgtttacgcgaaaatctcctgcgaaacgttgatcccatgccagttcagcgccttgacgacgggtctttccggcatttttgtaagtcgtacgcccaccgctactgctatcgacaacaatttcatcatcagtgtcggtctgaaacaatgcgagactaagcagcccatcaccaatacgcgttttactgccgatctcaattgtatcgttggtggatggttttaaacctaagttcataccgctttgcccatcagcacgataagacagctcattaatcgtcggcgtttcaaaacctcgcccggctgccagatagatattccaggcatcggtcattgcatattttaagctaccggcaggtagccatttatgataactggcatcaccgctgtcatcgccgttacccggagtaacgtaatggtcgttggaatcaaaccacacggagctgtagcgcacgccagcatccaggctcagtttttcgctcagctgccactgcgtctgtaaatagggatcgatgttccacatcagattgcgttcgtcgcgacgcaactcacctttttgcccgtactccggcatgccgctattcaggcggaagttattgtagcccttgcggttttcactcatgttttcgtagttcaggccggtagtgaacgtgaccggaacgcccagttcaccacggtgtgtccagcggctgtctattccctggtaatggcgttgcagggtaatcacgccgcccgcatgactcgggttaagttgtggtgccatgggtatactctggtactgggtcgtttctcgctctccggcatacatcatcacactcatatcatcccggctactcaggctacgctcatagcgcaacccagcctgagtttgcttgatggtttttcgcgtgtcgtactgttctgcacgaggcgcttgttgtggattagccttccattctgctttggttagcccacctgggtcatctgctttgatatccacactattgaaaatcagacttaatttgctggcttcatcaatgcgtacgcccagtttggcattggctaaatttttctgtgcgccactatggtcacgatagccgtgggtcgtaaaacgcgtggtactgacggtgtaatcgacatcgccaggctgtgtgccgtctcccgttgcgcccgttgctttcagcccatagcgccagctgccaaaactgccgtagtaactactggcttcaatggttggtggctgttgtccggtctgggtggtgacattcattaccccaccagacgcgttgccatacagggcagagaaggggccacgcagcacttccacattttgcacactgcttaaatcgatgttggatgtttgcccttgcccgtcgggcatggtggcgggaataccgtccacatacaggcgaataccgcgaataccgtaagtggagcgggagccaaatccgcgaatgctcagctgtaaatcttgcgcatagttctgccggttttgtacctgcaaaccaggcacgccggtcagactttcggacaagttaatgcgcggtgttgccaggcgcatctcctcgccatccaccacgcttactgctgctggggtatccagttcactaaccacctgcggtgcggcactgacaatcatagtctgttcatcagcggcaaaaacaacgggggaaaggacaagcagtgcgggcaaaacggtctgtcggacggaaaaaatcttcatgaaaaaagccaggttaagaatgggaaaacgccgtcatggtaatgaaattgtaaatttatggaaaatgaaacggcacaatacgttaagtaattgagaaaattgtagtcgtaacggcaagaaatgctccacatttgagaaaataatgattaccattcccatttataacaagagcgtaacgatgattacgcttagcgaagcattgtgaagcagcaaaaatatcggttcatcaaagggagtcgtcatgcatttacgtcatctgtttagtagccgcctgcgtggtagtttactgttaggtagtttgcttgttgttagtagtttcagtacgcaggccgcagaagaaatgctgcgtaaagcggtaggtaaaggtgcctacgaaatggcttatagccagcaagaaaacgcgctgtggctcgccactagccaaagccgcaaactggataaaggtggcgtggtttatcgtcttgatccggtcactctggaagtgacgcaggcgatccataacgatctcaagccgtttggtgccaccatcaataacacgactcagacgttgtggtttggtaacaccgtaaacagcgcggtcacggcgatagatgccaaaacgggcgaagtgaaaggccgtctggtgctggatgatcgtaagcgcacggaagaggtgcgcccgctgcaaccgcgtgagctggtagctgacgatgccacgaacaccgtttacatcagtggtattggtaaagagagcgtgatttgggtcgttgatggcgggaatatcaaactgaaaaccgccatccagaacaccggtaaaatgagtaccggtctggcgctggatagcgaaggcaaacgtctttacaccactaacgctgacggcgaattgattaccatcgacaccgccgacaataaaatcctcagccgtaaaaagctgctggatgacggcaaagagcacttctttatcaacattagccttgataccgccaggcagcgtgcatttatcaccgattctaaagccgcagaagtgttagtggtcgatacccgtaatggcaatattctggcgaaggttgcggcaccggaaagtctggctgtgctgtttaaccccgcgcgtaatgaagcctacgtaacgcatcgtcaggcaggtaaagtcagtgtgattgacgcgaaaagctataaagtggtgaaaacgttcgatacgccgactcatccaaacagcctggcgctgtctgccgatggcaaaacgctgtatgtcagtgtgaaacaaaaatccactaaacagcaggaagctacccagccagacgatgtgattcgtattgcgctgtaatagatatggcgagggtgaaaacggtgagacttgcctgccttttatcacggcgtatccggcactttcgtcagtaatctgaatttgcccggcacgtagccgggcaattttgcaattaactcgccgtttcaggcttaaacacaatttcctgtttttcttcatcttcctcgacgactggcgcagtgctgtgaatttcagcaacgcgtttgcgcacaccaaaccagcctataaccagcaaaataccgataatcggcagcgccgcgatagtataagtcccgttcgggtaatcgaacgccatcagcacaaggacactcagtaaaaacagtaatgtcagccaggaagtgaagggcgcgccaggcagtttaaaactgacatccgctgctttgccttctttaatcgctttacgcaggcgcatctggcacacgatgataaacgcccaactagcgatgattcccaggctcgcgaagttcaacacaatctcaaatacgcggctcggcaccagatagttgaggaatacgccgacgacatacacaactagtgtcgccagaatcccggcatacggcacatgctgacgactcattttcgccataaaactcggtgcggaaccgcccatcgccatactgcgcagaatacgtccggtgcagtacagaccactattcaggctggagagggcagcggtcagcaccacaatgttcataatgctgccgatatatggcacacccagtttagagaaaaacgtcacgaacggactttgccccgcctgatacgcgctccacggcaataacataaccagcaacaccacggagccgacgtaaaacaggccaatacgccaaatcacactgttaatggctttaggcaccatggtctgcggatctttacattctccggcagctgtacccaccatttcaatggaggcaaaagcaaacactacgccctgaatcaacaccagcgcaggcagcaaaccgtgggggaagaagccgccattatcggtgattaaatgaaagccagtggtgttgccatccagcggctgaccactaccgaggaacactgtacccacgaccaaaaaggtcacaatggcgagcactttaataagcgcaaaccagaactccatctccgcaaaccatttcacaccgatcatattcatggtgccaacgatggtaagtgcagcgagcgcaaagacccactgcggcacgccgccaaacgcaccccagtaatgcatatacagagcgacggcggtaatatcaacaatccccgtcatcgcccagttgatgaagtacatccagccagcaacataagcggctttctcacccaaaaactcacgggcataagaaacaaaactgccactggaagggcggtgtagcaccagctcacccaatgcacgcagaataaaaaagctaaacaagccacaaattaaataaaccagtgccagtgcgggccccgccatttgcagtcgggctcctgcacctaaaaacaagccggtgccaatcgcgccgccaatggcgatcatctgcacctggcgattgcccatcgctttgtgatacccctcttcgtgggcattaagccagcggcgtttcgcggcgtgttgatcactagtgtcggtgtcgtgtttactcattgctctccctgattgctttaatgaaaaagtcatataagttgccatgaacaatgtttattcatcctggcgatgatagttatcaccattattctttatgggtataaaactatcggcgcagcatcctacccgttatcgataaacgatgcaaaacatccccttacaatcctgaaggggattaatacaactgacgaaaaaatgacaaatccttttgctggttaacctgtgtactgtcctacacttaatctttaaaagattgtgaggggcatatgattaaggtgtatggcgtacccggatggggctctacaatcagtgagctgatgctaacactggctgatattccttatcagttcgttgatgtcagtggttttgaccacgagggagctagtcgcgagttattgaaaaccctgaacccgttgtgtcaggttccgacactggcattggaaaatgacgagattatgacggagacagcggcgattgcattgatggttctcgatcgtcgcccggaccttgcgccaccggttgggcgcgccgaacgtcagctgtttcaacggctattggtctggctggttgctaatgtctatccaacattcactttcgccgattaccctgagcgttgggctcctgacgcacctgaacagttaaagaagaatgttattgaatatcgaaaaagcctttatatctggttgaatagccagctcactgctgaaccttatgcgtttggtgagcaactaacgctggtggactgttatctttgcactatgcgcacatgggggcctgggcatgaatggtttcaggataatgccacgaatatcagtgcgattgctgatgctgtatgtcagttaccgaaattacaagaagtattaaaaaggaatgaaattatttgagtgggataccagaagattatgttatttattattcagtaactttatccacaatgatgggcgtaattaattaaattcatggtatgttttttaatttatatcactctccttttcattcagcgtgtctatttcatttcctctgaaaagaaactaactattcacatcgtgcagatgtttcagttgttaagtcaggcattctataatctcaaaatgtttttaatgatggatatgctcggagttggagatgcaattaatattaatacaaataaaaatatccggcaggtatgctaaaaggataaatggcgttctctgtatttattcgcaattatctgtaggacaaatatggagagcttgatgagtcagagctaaaacagcaattgattaataaacatgttgatttattcaagaaaatggatgtattttaaatgttgattcttaatataacctaatcaatagattatcaagtgagagctacacattattggaggggcaggggaaaacaccattttgggaacaatgcatcaggtactcttaccactgaagcaagatcatccggcaccaggtggtggtgcagtgctttggaaatggtcccctcgggggagttgtcattattttctatgctatttgcttattatattcatcaggtgaatttaataaattcctaatttgaaatatccactattaagctagtgtttaacgacgttaagatggcaatgtgcagatcatgttatcagggtggggcggtagcgtatattccttatacaaaccatcattcatttcaatgattgttattgaattatttattgttgtgaataaaaagacattatgaatattggtttgactttgcatatcaggttttttattactcgctgtaatgtacgagcctgtcgtgaataacgtcgagaacccatccgttgcgtttgtgattattttgttgactaaacagacacccgtttctctgaagtaaaatcccagactaaatcatcacataaccatgacatttttctgatattccccggtaacgccagataacgatgccaaatttaccgttatgttcaatcaactccctggtccatgtcgatttatctaccacaatcgccacgcgtggaggttcaaactccaccggcattgaccaggctgcagccataatgttacgccgctgggattgctcatcgaaactggtgatcaagaccgttgggccatgatttaacagacggctggcatggtgtaattctatggggatgaatcggctcatggtatcgcctcgcgaagaaggtttttttaagcgtagtccgtaacgcaataagtaacgaaattaacgggattggcgatttgcgaacgtgatgcatgtccgcgatcgcacaaaatagccggtgcggcgtctattccaggttataagttgagaaaaccactaagggaaacgcctgatgacgcccattctgaatcactattttgcccgtattaactggagcggagctgctgcggtcaatattgatacgcttcgtgcattgcacctgaaacacaattgcaccattccgtttgaaaacctcgacgttttgctgccgagggaaatacagcttgataatcaaagcccggaagagaaactggtgatagcccgtcgtggcggttactgttttgagcagaatggcgtgtttgagcgggtgttacgcgagctggggtttaacgttcgcagcttgttagggcgcgtagtgttaagtaatccgccagcattaccgccgcgcacccatcgtttgctgttggtggaactggaagaggaaaaatggattgctgatgtcggtttcggtgggcagacgctaaccgcgccgattcgtttagtttccgatctcgtgcagaccacgccacacggagagtatcggttgttgcaggagggtgatgattgggtgttgcagtttaatcatcatcagcattggcagagcatgtaccgttttgatctctgcgagcagcaacaaagcgattatgtgatgggcaatttctggagcgcgcactggccgcagagccattttcgccatcatttgctgatgtgccgccatttgccggacggcggcaagctgacactgaccaattttcattttacccattatgaaaatgggcacgcggtggagcagcgaaatctaccggatgtggcgagtttatatgctgtgatgcaagaacagtttggtctgggcgtggatgatgcgaaacatggctttaccgtggatgagttagcgctggtgatggcggcgtttgatacgcacccggaggcgggaaaataatttatgtcaggttgccggatgcggcgtaaacgccttatccggcatacattagcccggttgtagacctgacaggcgaagcgcatcagacaacggtttcagagttcaattgcccattcggcatgaaacaaaatcaccgctgtgccactaatggtgactttttccggttggttatcacgaattgtcaccgtcacttcaatcataccgtcacgccccaatgcgcgcccctgatggcctttaacacgcaacacgttgccatcgtggggcaatacgttgtgatgtaccaaccatgcacccatcgggccattggcattgccagtcaccggatcttccacaataccaatcgcagggctgaacatgcgaccatcggtttcgtttttgcctgggcggatctggaacgggaagaaaccattgcagccaatctttttgctgatagcggtcagcgcattaaggtcagggctaagggcgtcgatatccacttccggtttcagtgggatcatcactttactgtgtcctgttgttgccacctgaattggcaagcctggcagaatatcgtcctcagtgagatgaagcgcgttgataatcgccgcacgtgtttcaccttccagcggtggctcaaagcccggcgtaccttgttccaggctaatacgataatcatcgttgtgcttttcgatagtcacgcgatgttttcctgccaggcttgtttgccagatcgtgcaatttcctaaacctaacaccttcgcacgtacatagtgcgcagctactgtcgcgtgaccgcaaatcggcacttcaaccgttggcgtaaagtagcggatgcgcacatcgctgtcgtcgctgtgcagcagaaaagcagtttcgctatggcctaactcgcgggcgataagctgcatttgcgcttcgctaagattatcggcggggaaaacaacaccggcagaattgccgcgaaacggttgactggtaaaagcatcgacgtggtacacctgcggtttcattaacgttctcctgtgactggagaactatcatagcctgcaagtggccggagagcgaagggctatccggccagggtgaaattatcgccggctacgcacaatttgatatcgacgagtaaagtactcaaacggcgcgctccacacatgcaccagtcgggtgaacgggaagagcaggaagatggtcattcccaacaccagatgcaggcggaagacgaacgctacgccgttgagcatctcactgcttccaccacggaaagtgacaatgctttgcgcccaacccaccagcttcatcatttcgctaccatcaggatactgtgcactaaacggtatggtacttagccccaacagacactggatcagcaaaatgctcatgatgatgatatccggcgtagtggaagtggcacgcacgcgctgatttgtcagcctgcgccacagcagtcctgcgccgccaatcaacgtcaacacaccgcaaataccgccgagcaccatcgccatgagttgtttcgctgccactggcaaaaaccacgcgtacatccagtgcggcgttaacatgccgaacaagtgcccgaagaaaatccccaaaatgccgatatggaacagattgctccatatcaccatcccgcgtttatcgagcatttgactactggaggcgcgccaggtgtactgcccgtagtcgtagcgcagccagctgccgaggaaaaacaccgtcgcacaaatgtacgggtagatatcgtaaaaaaagacgttcagatactgaatcatttcccacctcccgcactgatgtcgacatattgcggcgcgacatcctggctaaagcgtcgctgatattgattaagcgggctgctgtcacacgccgtggcgttatcttcaataaacttcacctgttcctcttcccacactgcatcaagcgcctggcgggtgtcatcgcgctcttcgctgtttacttgttttgtgacactgtcactactaagggagcttcccgccagttgcagcagagcatcaaacaacgcgtaccacggtgcctcgcgttgttttaagcgaccgccaagcagggcgaggatcggcgcaacattgagcaatccttctttcgcctgatcgtcaggcagtacgcttaaatactccagatacagcggtagataatcgggcagttcccgacaatccagctgcaggccgaccttttcatactccgccagcaggtccaccattgcctggccgcgatcgcgggactcggcatgaacatgttcgaacagcagcaggctcgtggtgcgcccgcggtcaaacacttcgcaccattcggcctgtttatccagcagcggcgcgttaagcaggttgtgggtgaaatccgtaagcatcggcgcgtcgcggcggatcaacgccagcgcgtcctccttgcattcccacaacagctcgtccggatactccatcaacaggccgatcactttgaggatctgcattattcgccctccgctttgtcgcgcacttcggtgatgttgatggcatcgatacggctactgttgaacaggttgaatttactgtcgctaccgtggcaaccgtcgccaaaggtaaaaccgcagccgttgcgttctgcgaaggcatcgcccgccatttcccgatggctggtcgggataacaaaacgatcttcatagttggcaatggcgagatagcgatacatctcttcgacctgggcgacgctcaggcctacttcgtcgatggcacgagtatcagtaacgccttccacggtttgactacgcatatagtggcgcatcgccatcatccgtttcagcgcccgcagtaccggaccggtatcgccggcactcaacatattggcgagatattgcaccggaatacgcaggctttcgatggcgggcagcacgccttcgcttttcggcaaaccgcccgcatctgcgtaggactgaatcggactcagcggaggaacgtaccagaccatcggcagggtgcggtattcagggtgcaacggtagtgccagtttccagtccatcgccattttgtagactgggctacgctgggcagcgtcaatcacattttgtggaataccttgtttcagggcttcctcgatcacactgggatcgtgtggatcgaggaacacttcgcactggcgttcatagaggtcaacttcgcgctcggtgctcgccgcttcctcgatgcggtcggcgtcgtaaagcagcacgcccagataccggatgcgacccacgcaggtttcactgcacacggtcggttgaccggactcaattcgtgggtaacagaagatgcatttttcactcttgccgcttttccagttgaagtagatttttttgtacggacaaccgcttatgcacaaacgccagccacggcatttatcctgatcaatcagcacaatgccgtcttcttcgcgtttgtagatagcgccgcttgggcaggtcgccacgcagctgggattgaggcagtgttcgcacaggcgcggcaggtacatcatgaaggtgttttcaaactgcccgtacatctccttttgcatggcctcgaagttgcggtcgcgggcacgtttttcgaactcaccgcccagcagttcttcccagtttggcccccagatcactttgtccatccgtttgccgtcaatcagactacgcgggcgagcagtaggaatatgtttgccttccggtgcgctatgcaaatgttcgtagtcgaaggtgaaaggttcgtagtaatcatcaatctgcggcaccaccgggttggcgaagattttggttattacgcccatcttgttgcccagacgcgggcgtatcttgccattcacatcacgcacccagccgccttgccactcttcctgatcttcccagtttttcggataaccaatgcccggtttggtttcgacgttgttaaaccatgcgtactccatgccttcgcgcccggtccagacgtttttacaggtcacgctacaggtatggcagccgatacatttgtcgaggttaagcaccatgccgacttgactacggattttcattttttcgcctcctgtacctgatcgcgaccttcatcatccagccagttaacgttcttcatcttgcggatcatgatgaactcatcgcggttgcttccgacggtgccgtagtagttaaagccccaggccagctgcgcgtaaccgccaatcatatgcgttggtttcgggcaaacgcgggtaacgctgttatgaatgccgccgcgcatgccagttacttcgctaccaggaatattcataatgcgttcctgggcgtgatacatcatggtcatgcccggcggtacacgttggctgaccaccgcgcgggcagtcagcgcgccgttggcgttgaatacttccacccagtcgttatcgacaatggtcagttctcgggcatctgtttcgctgatccagacaatcggtccaccgcgagagagcgtcagcattagcaggttttcactgtaggtactgtgaatgccccatttctggtgcggcgtcaggaagttaagtgctttttccgggaagccgtttggcggtatctggcgcatctcactgacgctacgggtgtcgataggcgggcgataagccaccaggctttcaccaaaagcacgcatccacggatgatcctgatagagctgctggcgtccgctcagcgtgcgccacggaattaactcatgaacgttggtgtatcccgcgttataggagacgtgatcgctttccagaccggaccaggtggggctggagataattttacgcggctgcgcctgagtatcgcgaaagcgaatcttctcgtcctctttgtgcagcgccagatgggtatgttcgcgcccggtgatctcgcccagcgcctgccacgctttgactgcaacatgaccgttggtttccggtgccagtgccagaatcacttcactagcgtcaatggcggtgtcaatcagcggacgcccctgtgccgggccatcacgcttggtgtaattgagtttgccgaggaaatcgatttcatcctgggtattccagctaatccctttaccgccattgccaagtttgtccatcaatggcccgaggctggtaaagcgttcatacgtagcagggtagtcgcgctccaccgccacaatattcggcgcggttttgcctggaatcagatcgcattcgcctttgcgccagtcgagcacttcacacggctgactgagctctgccggagagtcatgcagtaggggttgtaataccacgtcggtttctttgccaagatgacccacgcacacttggctaaatgctttggcgatacctttgtagatttcccagtcgctgcgactttcccacgccggatcgaccgccgcagaaagcggatgaataaacggatgcatatcgctggtgttcatatcgtctttttcgtaccaggtggcggtgggcagaacgatatcggagaacaggcaggtactggacatgcggaagtcgagcgtcaccagcaggtcgagcttgccttcaatcgctgcagtttgccactcgacttcttccggtttgatcccgtcgctggcaccgagttcctcgccctgaatcccgctttcggtccccagcagatacttctgcatatactcgtggcctttgccggaggagccaagcaggttagagcgccagacaaacaaattacgcggatgattgctgctgctatctggttgttcgcaggccatacgtaaatcgccgcttttcagcgcctgggcggtaaattctgtgggggataatccggccttgtcggcttcagctttaatcccgagcgggttacgccccagctgcggcgcagaaggtagccagcccatacgttcggcgcgaacgttgaaatcaatcagatgaccgctgtacttactggcatcggcgagcggactaagtaactcctgagcagagactttttcatagcgccattggctggaatgattgtagaaaaagctggtgctgttcatttggcgcggtggtcggttccagtcgagcgcaaaggccagtggcaaccagccggtttgtgggcgcagtttttcctggccgacatagtgtgcccagccgccaccgctttgcccgacacaaccgcagaagatcagcatattgatcatcccgcggtagttcatgtccatgtgataccagtggttaacacctgcgccgaggataatcatgctgcgcccatgcgttttatgggcggtatcggcaaattcacgggcgatggtttcaatatactggcgcggcacgccggtaatttgctcaccccaggctggggtgtacggtttgatttcagcgtaatctttcgcactgttttcatcttccagcccgcgatcgaggccgtaattcgccagtaccaaatcataaacgctgaccaccggacaggtgttgccatcgactaacgtcaggtttttaacgggcaattggcgcaccagcaccggattgtgttttacgctgcgaaaatgcggattttcaatgccgccaaagtaggggaaggccacgcctgcaacagcgtcatgttgaccgagcagggttaagctcaattcggtttccgtaccggcggcaatggattccagattccatttgcctttttctccccagcggaaaccaatgctaccgttcggcactaccaattcacctgcggtattaactgctacggttttccactgcggattgttgctttcgcccagtccatccaccaggtcagatgcgcggatcatgcgcccgggaacgtagctaccatcgtcgcgaggctccagcattaccagcatcggcatgtcgctgtagcggcggcagtagttgataaagtagtcgctgggattatcgagatgaaactcttttaaaatcacatggcccattgccatcgccagggcgctatcagtgccttgtttcggtgccagccactggtcgcacaatttggccacttcagagtagtcaggggtaatggcgatggttttagtgcctttgtagcgtacttcggtaaagaagtgggcgtccggcgtacgtgtctgcggtacgttagacccccaggcgatgatgtagctggagttataccagtcggcagattccggtacgtcggtttgctcgccccaggtcatcgggctggcgggcggcaggtcgcaataccagtcgtagaaacttaaacaggtgccgccaagcaggctcagataacgcgttccggcggcgtaagaaaccatgctcatcgccgggatcgggctgaaaccggcaacgcgatccgggccgtaggttttgatggtccagacgttagcggcggcaatcagctggtttagttcctgccagttggagcggataaacccgccgcgcccacgcacttgtttgtagctcaggcacttttgcggatcgttcataatgcttgcccacgccagtaccggatcgctgtgttgcttgagggcttcgcgccacagttcaatcagtcgtttacgaatgagcgggtatttcaggcggttagcgctgtaaagataccaggagtaacttgcgccacgcgggcagccgcgaggttcatgattgggcaggtcagggcgagtgcgcgggtagtcggtctgttggatttcccaggtcaccagaccatttttaacgtagattttccagctacaggagcctgtacagttaacaccgtgggtggaacgcacgattttgtcgaactgccaacgctggcgatagctgtcctcccagtcgcggttgctatgcatcacctgtccgtgaccatcggcaaaggtttcgcccttttgtttgaagtagcgaaagcgatccaaaagtttactcatgacatgactcctgctccaggaatgaattgggatctgatgccttgtcggatgcgacacggttgtacatcaggcatcgatctcttatttttggctgaacttccgccgaccataaaccagccaggtcagcagcacacaaacgatgtagaagattaaaaacactttcatcgcgccgaccggagagccggtcatattgaggctcatgccaaacgcctgcggaataaaaaagccgcccactgcgccaatggcactgataaagcccagagccgccgccgtttcggtgacggcttcttcatgagcttgctcatcactaccgcctttcatctttacccgataaatggttatctggcgaaagatgacggcgatcatctggaaagtagaaccacttcccagacccgcagtcagaaacagccccataaatacggcgtaaaaggcgatgaaattaccggagcctgtgcccggtaaggtaaggaacagcagggcactgaaaatcgccataaaaataaagttgatcaacgtcacccgcacgccgccgaacttatcggaaatagcaccaccaacgctccgcgcgatggcaccgataaatgggccaaagaacgccaggcgcagaatattcacatccgggaactgggtttttgccagcatggcaaaacccgcagaaaaaccgataaagctaccgaaggtggcaaggtaaagcaggctcagcagccagagatgcaggcgttgtaagacagggagctggtcggcaatactggcgcgactactggcgatatcattcatcccactccatgcggcgatcgtggcaatcgccagtagcggtacccaaatccatgcggcattcgccaggctcatcacgctaccgtcggcctgcggtacgccattgacgccgagaaaggcaaatacaggtacaaaaatgaccagcggtgcaaccagctgcattacacttacacctaagtttcctaatccgccattaatcccaagagcgctcccttgtttggcttttggaaagaagaaactgatattgcccatgctgctagcaaagtttgcacctgcaaaaccgcatagcaaagcgataacgataaatatcccaaaaggagtattcggattttgcacggcaattccgagccagacgcaaggaataatcaggattgcagtactaaaaaccgtccatcggcgtccaccgaatataggcaccataaaggagtagggaacacgcaataatgcgccagaaacggagggtaatgcggttaataaaaagagttgatcggtagtaaaattaaaaccgattttattgagattaacggtaactgcgctaaatagcatccagacacagaaggcaagaagtagacaactgacacttatccagagatttcttcgagcaatatgttttcctttattttcccagaaggccggattttctggtttccagtcgcgcaaaagataacgactatttttctcattttgcagtgccatattgttcctcacatgcacacattggtaatgaaaaaaagacaaaacacgaggtaaggcgcaatagccagttattagaattaaggatgaattgggtgaagtgctgattgaaagaatagataagaaagcgtaaccgcgggggcagaatggggattaagtagccagatatgtgttactaaatgtaactaacaagctaaccttcaaacggggttaatctttgaacgtatgtcatgtttcaacccttcagatcgtgaatctaaagggttacatattaactatattatcaacaagaccagacacttatagaattagtgatgatttattcattaaaaaggccaactactggaggaaaagcttctgtccagaaggtctatcggttcctctcttattgcctgattgtaataatcgttattacagtaagtattgtttatttcatctaaggtcatgtttttaacttttatattcatctggtttacaacttcctctgtcttgtaagtgtgtatattatatggggtatatgcttttttaataggatagtgaaacaattcgttatccacatctattccgtcagagtgaacttcaaatgcaccagggctaagaattgccaggccagtattaagcttaagtgctggggaaaacaaattaaataacatgagctgcatagtagggcaattgttcttcccagaaacatttaaaaaatttaagttttgctctgttttattatggggaataaagttccaatatcggatgtattattagtatcaatgtgggttattttattattgtccagtcttaaacttttgatagatggaagataagtcaggaaatcaagatttatatatttcaactggttgttagcagcgtttaatgtctgaacattgcagaagttgctatagaatattttaatttcagaaagcaaattgttgttaataagtaacgtattcaagttgggaaataagtcattgtgtaaacttgttagtttattatgggatagatccagcagtaagagttcatttttattacctgcaacaatatcagttaattgattatggctgagattcaggtattgcagccattcgcaagattctaattgcacaaactctagttgattatgtgccgcactaaaataagtaacactactaagcctatctatatcaatatttctgagagcattattattcatagatatatgtgtaatacttacatttctgccttgaggaaaatttatactctcaagagcattactattcagacttagctttacgagtctatcgtagttggttgcatcaaaatgtgtgaattggttattatcaagattgatagatgtgaagttttgcagccctggtggttgagtggttaaattaagtccacttaaatcaatggtcacttcattagtgtcatcaattatatttcttactgcagtccagtactgcatttgtgcaagtggatcattgttgatgccgttaactaatacatgccaaagatgtttactacttattagttgatcaatgtcattggttggcagtaaattgttattgcttaagtttaaatattccagttttgtagtgtttttggcgtttaaatgtgcaatatggttgtcgtttaaagtgattgttttcatcctgggatgattgtgtaatataaggtcagtgatcatattgtgatgggcacttaactcaatcagagattcttgccgcggctgccgttggcttcatcgttatagcctttaaaatcatattcccagtgaccaaaaccaatcatttgatcattgatttgcgtttctcctttaaagccgagacgggcataagttttatcaccatcgtcacgcttatcatcagtaaaataacgtagagcggtaaccttgccataaaggtcgagtttattaccatccttgttatagacttcggcagcgtgtgctacgttcgcagctaacaaaccagttacaaccaccgcaactatttttaatttcatttaacagaatccttttaattatcgttaaacgtattttctaaacgaattttaaacggcgtcatttataaatgacatactgtttttaaaatagaatggtgattaaaaacaatgagaaaaatagatgaaataatattatttatcgatatgtgatcgaagtcgaaatgagatataaggtgaattactggtatttgaaatttatttttttaatattgtcggaatttatctgattaactaccgggccgtagacccggcagttattttaaccacgacgtgtcgccagccagcagagcagggaaccgccgcagaccatcagcgcgccttgccagaagctgaagctcagcggggcgctgagcagcacggctgcaagcgcactggaaagtacaggcgtaaaatagctacctaccgccataatggtgacattgccatgcaatataccgacattccatgcagcataagcaaatcctaaggtaaatgccgcagagatgagtttaatcatgacgggcgtgctaaatatcatttctggttgtggcgtaagaaaatagtaaacccacagacttgctcccgttagcaggacaaaaacggtaattccattaaatccgcgtgcgtatttattcgttactgtgcaataggctgcccagataaacgcaccaatgaacgccaggaaataactcaatgggctggtggtgatattattgatgatttcatcataatgtaacccattgtcaccgcctaacacccaacagacgccgacgagggctaataataatccaggtacaatcaaccagttggttttctgaccattaaacagaatggcaaagagaattgtcaggctgggccacagatagttcaccatacccacttcaatcgcctgatgatgggtcgccgcataccctaaggaaagcgccagacagatttcatagctgacgaataacagactcccggcgagtaaatagcctttcgggatttgccgaatacgcggaaatccaaccgtgaagattaacagcagcccgcttaaactatagatagcagctgcgccgccgaccgggccgagcccctcactgacaccgcgaatcaatcctaccatcgtgctccacaggacgatcgctatcagccctatgagcgttgctttttgtcgtgtcatgctcgctgttttgtctctcttgccgttaaaaattaagctgaattttatagcatttttttaactggcctgtcaggcagtggtgcgtttttctaccgctattgaggtaggtcaatttgcgaaggcggattattttgtggcaaacagatgttctttttgatttcgcgcaaaaagattcagaattttactgttagtttcctcgcgcagtaatacccctgaaaaaagaggaaagcaatggacgtcagtcgcagacaattttttaaaatctgcgcgggcggtatggctggaacaacagtagcggcattgggctttgccccgaagcaagcactggctcaggcgcgaaactacaaattattacgcgctaaagagatccgtaacacctgcacatactgttccgtaggttgcgggctattgatgtatagcctgggtgatggcgcaaaaaacgccagagaagcgatttatcacattgaaggtgacccggatcatccggtaagccgtggtgcgctgtgcccgaaaggggccggtttgctggattacgtcaacagtgaaaaccgtctgcgctacccggaatatcgtgcgccaggttctgacaaatggcagcgcattagctgggaagaagcattctcccgtattgcgaagctgatgaaagctgaccgtgacgctaactttattgaaaagaacgagcagggcgtaacggtaaaccgttggctttctaccggtatgctgtgtgcctccggtgccagcaacgaaaccgggatgctgacccagaaatttgcccgctccctcgggatgctggcggtagacaaccaggcgcgcgtctgacacggaccaacggtagcaagtcttgctccaacatttggtcgcggtgcgatgaccaaccactgggtggatatcaaaaacgctaacgtcgtgatggtgatgggcggtaacgctgctgaagcgcatcccgtcggtttccgctgggcgatggaagcgaaaaacaacaacgacgcaaccttgatcgttgtcgatccccgttttacgcgtaccgcttctgtggcggatatttacgcgcctattcgttccggtacggacattacgttcctgtctggcgttttgcgctacctgatcgaaaacaacaaaatcaacgccgaatacgttaagcattacaccaacgccagcctgctggtgcgtgatgattttgctttcgaagacggtctgttcagcggctacgacgctgaaaaacgtcaatacgataaaagctcctggaactatcagctcgatgaaaacggctatgcgaaacgcgatgaaacactgactcatccgcgctgtgtgtggaacctgctgaaagagcacgtttcccgctacacgccggacgtcgttgaaaacatctgcggtacgccaaaagccgacttcctgaaagtgtgtgaagtgctggcctccaccagcgcaccggatcgcacaaccaccttcctgtacgcgctgggctggacgcagcacactgtgggtgcgcagaacatccgtactatggcgatgatccagttgctgctcggtaacatgggtatggccggtggcggcgtgaacgcattgcgtggtcactccaacattcagggcttgactgacttaggcctgctctctaccagcctgccaggttatctgacgctgccgagtgaaaaacaggttgatttgcagagctatctggaagcgaacacgccgaaagcgacgctggctgatcaggtgaactactggagcaactatccgaagttcttcgttagcctgatgaaatctttctatggcgatgccgcgcagaaagagaacaactggggctatgactggctgccgaagtgggaccagacctacgacgtcatcaagtatttcaacatgatggatgaaggcaaagtcaccggttatttctgccagggctttaacccggttgcgtccttcccggacaaaaacaaagtggtgagctgcctgagcaagctgaagtacatggtggttatcgatccgctggtgactgaaacctctaccttctggcagaaccacggtgagagcaacgatgtcgatccggcgtctattcagactgaagtattccgtctgcctagcacctgctttgctgaagaagatggttctatcgctaactccggtcgctggttgcagtggcactggaaaggtcaggacgcgccgggcgaagcgcgtaacgacggtgaaattctggcgggtatctaccatcatctgcgcgagctgtaccagtccgaaggtggtaaaggcgtagaaccgctgatgaagatgagctggaactacaagcagccgcacgaaccgcaatctgacgaagtggctaaagagaacaacggctacgcgctggaagatctctatgacgctaatggcgtgcttattgcgaagaaaggtcagttgctgagtagctttgcgcatctgcgtgatgacggtacaaccgcatcttcttgctggatctacaccggtagctggacagagcagggcaaccagatggctaaccgcgataactccgacccgtccggtctggggaatacgctgggatgggcctgggcgtggccgctcaaccgtcgcgtgctgtacaaccgtgctagcgcggatatcaacggtaaaccgtgggatccgaaacggatgctgatccagtggaacggcagcaagtggacgggtaacgatattcctgacttcggcaatgccgcaccgggtacgccaaccgggccgtttatcatgcagccggaagggatgggacgcctgtttgccatcaacaaaatggcggaaggtccgttcccggaacactacgagccgattgaaacgccgctgggcactaacccgctgcatccgaacgtggtgtctaacccggttgttcgtctgtatgaacaagacgcgctgcggatgggtaaaaaagagcagttcccgtatgtgggtacgacctatcgtctgaccgagcacttccacacctggaccaagcacgcattgctcaacgcaattgctcagccggaacagtttgtggaaatcagcgaaacgctggcggcggcgaaaggcattaataatggcgatcgtgtcactgtctccagcaagcgtggctttatccgcgcggtggctgtggtaacgcgtcgtctgaaaccgctgaatgtaaatggtcagcaggttgaaacggtgggtattccaatccactggggctttgagggtgtcgcgcgtaaaggttatatcgctaacactctgacgccgaatgtcggtgatgcaaacagccaaacgccggaatataaagcgttcttagtcaacatcgagaaggcgtaagggggcgaacagatggctatggaaacgcaggacattatcaaaaggtccgcaactaactccatcacgccgccttctcaggtgcgtgattacaaagcagaagtcgcaaaacttatcgacgtttccacctgtatcggctgtaaagcctgtcaggtggcgtgtagcgagtggaacgacatccgtgatgaagtggggcactgcgtcggggtttacgataaccccgccgatctgagcgccaagtcctggacggtgatgcgctttagcgaaaccgaacagaacggcaagctggagtggctgatccgtaaagacggctgtatgcactgtgaagatcccggctgcctgaaggcgtgcccgtctgctggtgcaatcattcagtacgctaacgggattgtcgatttccagagcgaaaactgcatcggctgtggttactgcattgccgggtgtccgtttaatattccgcgcctcaacaaagaggataaccgggtatataaatgcacgctctgcgtcgatcgcgtcagcgtcggccaggaaccggcttgtgtgaaaacctgtccgaccggggctatccacttcggcaccaagaaggagatgctggagctggcggaacagcgcgtggcgaaactgaaagcgcgtggttacgaacatgctggcgtctacaacccggaaggggtcggtggtacgcacgttatgtacgtgctgcatcacgccgatcagccggagctgtatcacggtctgccgaaagatccgaagatcgacaccagcgtaagcctgtggaaaggcgcgttgaaaccgctggcagcggctggctttattgccacttttgccgggttgattttccactacatcggtattggcccgaataaggaagtggacgatgacgaggaggatcatcatgagtaagagcaaaatgattgtgcgcaccaaatttattgatcgcgcctgtcactggaccgtggtgatttgcttcttcctggtggcgctgtccgggattagcttcttcttcccgacgctgcaatggctgacgcaaaccttcggtacgccgcagatgggacgcattttgcacccgttcttcggcattgcgattttcgtcgcactgatgtttatgtttgtgcgttttgtgcatcacaacatcccggataagaaagatattccgtggctgttgaacattgtcgaagtattgaaaggcaatgagcataaagtggcggatgtcggtaagtacaacgccgggcaaaagatgatgttctggagcatcatgagcatgattttcgtgctgctggtgaccggggtgattatctggcgtccgtactttgcgcagtacttcccgatgcaggttgttcgctacagcctgctgatccacgcggctgcgggtatcatcctgatccacgccatcctgatccatatgtatatggcattttgggtgaaaggaagcattaaagggatgatcgaagggaaggtaagtcgtcgctgggcgaagaaacaccatccgcgctggtatcgtgaaatcgagaaggcagaagcgaaaaaagagagtgaagaagggatataatctcttttgaactttaagctgaaaatggcgctgtaaaaggcgccattttcatattgtagacaacgtaggctttgttcatgccggatgcggcgtgaacgccttatccggcatgaaaacccttcaaatccaatagattgcagtgaacgtgtaggcctgataagcgtagcgcatcaggcaatgttgcgtttgtcatcagtttcaaatggcgctgtaaaaggcgtcattttcatattgtagacaacgtaggctttgttcatgccggatgcggcgtgaacgccttatccggcatgaaaacccttcaaatccaatagattgcagtgaacgtgtaggcctgataagcgtagcgcatcaggcaatgttgcgtttgtcatcagttctaaatggcgctttataaagtgccatttttttattgcgtaaccagacggcgtaatcggctcacatccactgttttttctgcctctgccagactccaggcgttttgcagattcagccacatttgcgggctactgccgatcaccacggaaagtttaatcgccatttctggcgtcaaagctgcttttcctgtcagcaatcggcttgccgtactgggagcaatttccattgctctggcaaactcgcgcagactgacattaagttcgtccagactttcctgaataatgtcccccgggcggggatgattggccattttcattagtgtctttactctcagtagcgttccttcactgggaacactatcattattgttccttcctacgcaacaataatccatttagccatttcatgttggagagtgtgcgatgctgcgacccgaacatggcagtcgcagcaaaggcctcttagtgacggaaatcaatcaccatgcggccacggattttgccttcttccatctcagtaaagatggtgttgatgtccgctaacggacgcagggcgactttcggcaccactttaccttcggcggcaaactggaaggcttcagttaaatcctggcgcgtgccgaccaggctaccgaccacttcaataccatccagcacaagacgtgggatatccaggctcatagactccggcggtagaccgacagccacaacacgaccgcctgcacggacagcatcaactgcgctgttaaacgcagctttagctaccgctgttaccaccgcagcgtgagcgccaccagttttctcctgcacaattttggcggcgtcttcggtgtgactgttaatcgctaaatctgcgcccatttcggttgccagttttaactgctcatcattgacatcaatggcgatcactttggcgttaaagacattcttcgcgtattgcagggcgaggttacccagaccgccaagaccgtagatagcaatccactgccctggacgaattttactcagcttaacggctttgtaggtggtgactcccgcacaggtaatgctgctggccgccgcgctgtccagaccatctggcacttttaccgcgtaatcggcgaccacgatgcactcttccgccatcccgccatcaacgctgtatccggcatttttaacactacggcagagcgtttcgttaccactgttacagtattcgcaatgaccgcatccttcgtagaaccacgccacgctggcacgatcgcctggttttaaactggtgacacctggacccacttctgccaccacaccgatgccttcatggcccagaattacgccggttttgtcaccaaaatcgccattcttaacatgaagatcggtatgacatacaccacaacactccattttcagcagggcttcgccatgtttcagactgcgcagtgttttatacgtaacgtcaacatgatgatccttcgtaacaactgcagccttcatagttcctccttttcggatgatgttctgcatagcaggtgaggcaaatgagatttattcgccactacccagtatggatgagatctgaaaaagggagagggaaatagcccggtagccttcactaccgggcgcaggcttagatggaggtacggcggtagtcgcggtattcggcttgccagaaattatcgtcaatggcctgttgcagggcttcggcagaggttttcaccgccacgccttgctgctgcgccattttgccaaccgcaaacgcaattgcgcgggagactttctgaatatctttcagttccggcagtaccataccttcgccgttcagcaccaatggactatactgcgccagcgtttcacttgcgctcatcagcatctcatcggtgatacgactcgcgccggaagcaataacacccaggccgatgcccgggaaaataaaggcgttgttacactgggcgatagggtagattttatctttccataccactggattaaacgggctgcccgtggcgaccagcgcgttaccttcggtccaggcgataatgtcctgcggtgtggcttccacgcgactcgtcgggttagacagcggcatcacgatcggacgcggacagtgtttatgcatctcacggatgatctcttccgtaaacagcccggtctgtccactgacgccaatcagaatatctggttttacattgcgcaccacatccagcagactcagcacatcgctgtcggtatcccagtcactgaggttttcgcgcttctgcaccagtttggtctggaaaggcagcaggttcggcatcttgtcagtcagcaagccaaagcgatcgaccataaagactttctgccgcgccgcttcctcgcttaatccttcgcgctgggtctgggagatgatcatttcggcaatgccgcatcccgcactacctgcgccaaggaagacgatttttttctcgcttaactgaccacctgccgcgcggcttgctgcgatcagtgtgccgactgttaccgccgcagtgccctgaatgtcatcgttaaaagaacaaatttcattgcgatagcggttaagtaacggcatcgcatttttttgagcaaagtcttcaaactgcaacagcacgtctggccagcgttgtttcacagcctggataaattcatcaacgaattcatagtattcgtcgtcagtgatacgcggattacgccagcccatatacagcggatcgttaagcagctgttggttgttcgttccgacatccagcaccaccggaagggtatacgccgggctgatgccgccacaggcggtatagaggctcagtttaccgatcggaatgcccatcccgccgatgccctggtcaccaagccccagaatgcgttcaccgtcagtcaccacaatcactttaatattatggttcggcacgttttgcagaatatcgtccatattgtgccggttctggtaagagataaacacgccgcgactacggcggtagatctcagaaaaacgctcacaggctgcgccgacggttggggtataaataacaggcatcatctcatcaagatgattgtttaccagacggtagaagagggtttcgttagtgtcctggatgttacgcaggtagatgtgtttgtcgatttcggttttgaatccctgatactggatccatgctcgttccgcttgttcttcgatggtttcgaccacttccggcagtaaccccagcaggttgaagttacggcgttcttccatgctgaaggcactgcctttattcaacaacggaaattccagcagtacagggccagcgtaagggatataaaggctacgctgtttttttgtttttggttccatgtcactcactcttttttgaatatccatccctggggggcttttatcgtctttgctttaccgccagggcgtcggcctcaagtataaagcagataaaaacaaaaacaccattgcgcaggcaatggtgtttaatcgtcattgaggactgatggttatgaattacttttcagcggggcgttttctgccggttgggttatttactacgctggatttgtcaccttcggtaactattttgcgctggttagaaattttatggtccagtccaagaatatgacgtgcctgacggttgcttttcattttaactcctcaatcctgtagctagttttaaggacaacatcgccgtagcgaagaaacacgtgctaaacccctaaattaggttgccgatcaagcatagcaccttaaagcgtagggtgctggccactgaccacataattgatcgtttgctggtagatatcactgaggatgtcgttatcagaagcttcaacccatttggtcagctccatgagaatgtcatcttcagtgacaacaccatgctgtgcccgaaggccttgctcaatggcattaaccagagcgggttctgctgtactattttctgcctgataataagtaaacatagtgattctccgtgtctgtgtatttatggtgtctgctacggatcgcagatttataaagcacattcagcatggcaaatatttgccgcttcgttgttaagattagtcctggttgatgatttttatattttaacaccatgatattcatagggattgtgattggtatgatccgattaatattgatacaatatcttttgggttatatattcccggtaatctattgtgggaatttaatttaagtgcagaagtaatattttcgccggattttattcggaatatcctgcttatcctcgtgctgtttctcacgtagtctataatttcctttttaagcccacaggagagcaacaatgacaatccataagaaaggtcaggcacactgggaaggcgatatcaaacgcgggaagggaacagtatccaccgagagtggcgtgctgaaccaacagccgtatggatttaacacgcgttttgaaggcgaaaaaggaaccaaccctgaagaactgattggcgcagcgcatgccgcatgtttcagtatggcgcttagtttaatgctgggggaagcgggattcacgccaacaagcattgataccaccgccgatgtgagcctggataaagtggatgccggttttgcgattacgaaaatcgcactgaagagtgaagttgcggtgccgggtattgatgcctctacctttgacggcataatccagaaagcaaaagcaggatgcccggtctctcaggtactgaaagcggaaattacgctggattaccagttgaaaagctaaagcattgccggatgacgcgtcaggcgcgtgaatgcctgatgcgttgttagcatctttacagcgcccgccagcaccggagctcacgtccgtcctcccttattgctaaactttgccggacttcacatccgtgggttgccagcgggcaacgttcgtagaaaaaacagccttgcggcaacgtgcggtttcccggcagatccgttttacgtaatgcccattcttcctccagcggtttatcaatggcggggagggaatccagcaataatcgggtgtatggatgtgcaggtgccgtcagcacctgctgcgcgtcgcccagttctacaatctgcccgagatacatcaccgccacccgatcgctcatatgacgtatcacgctgacattgtgactaatcagcacataggtcagcccgtgattttcctgtagcgttaccagtaaattgaggatctgcgcctgaacggagatatccagcgcagaggttggctcatcaagcacaatcacgtcaggctggctagagagtgctctggcaatggcgatacgttgccgctgcccgccggagaacgcatgaggcaggcggtcgagatactccggacgaatacccacctgcacagccaactcctctgccaacgctcgccgctgttgttcactactacgcttagctatccagagcggttctgtgatgatgcgccacaccggtaagcgcggattaaggctagagagcgggtcctgaaacaccatctgcataatgcgttgactgccagaacggatgtactgcccgtggctcggttgcagcatacccattaaaagctgtgcgagggtgcttttgccgcagccactctcgccgacgatccctaaggtttcaccacggcggatctgtaaatcaataccattaatggcatgaacatgttccgtagttttaccaagccagtttttacgggccgggaaattgatatggacgtcgcgtaacgttaataacgtgtcagacacttataacctcctgctgcggataccaacaggcacagcgctggttgttgtcaccacacgctgtcagcgccgggacgttttcacactgtgcacctgccgcatagcaacgatcgcgaaaagcgcagccgtcaggcaaatgggtgaggtttggtaccgtccctggaatggcgggtaatagctggcgtggtactccatgttctggtgcgcattgcagcaaaccaatggtatacggatgccggggatgatggataacgtctgccgtcacgccgctttcaattacgcttccggcatacatcacgtaaacgctatcgcacagttggctcaccacggccatatcatggctgatgaacagaaccgcagttccactggcgcgggctttatgtttaagcaaacgcagtacctgcaactgcaccgtgacgtccagcgccgtagtcggttcgtcggcaataatcaattgcggctcgcaggagaatgccagcgcaatcattacccgctggcgcataccaccactaagctcaaacggatagcggctcataacttccacggcatccgggatttgcatctcttccagcaggtcaatcgctttagctctggcttcccgacgacttattggttgatgatggcggatcacgtccatcatctgaagacctattcgacgtgtcggattgaggtcggtcatcggttcctgaaagatcatcgccactcgtgcgccgcgccactgacgaagctgtttttcccgcgcgttaagaacatcttctcccagcagggaaatctgcccccgatgtacgcaataactgcccgtcggtagcagacgcataatcagcattgcggtgacacttttaccactgccggattctcccaccagaccgacaatttcaccgcggttaatctgcaaggacacattgttgagcgcgtgaacatcaccgttaaaaccggggaaactcaaatgcagttgttgaatgtccagaacgggttgggtcatgactgctttcctcctgctttttagttcaactctgctttcctcctgctttcgggtcaagcagatcgcgaataccatcaccaaagagattaaacccgacggcggtaagcaaaatcgctgcccccggaaatgcgcaataccaccactgatcgagtacatagttgcgaccatttgctaccatcgcgccccattcagcactcggttgttgagcacccaggccaataaatcccaacgtggcggccattaaaatcgcgctaccgatatccaggcttgcctgcacgatcagcggcggtagggagttacgtaaaatatgccagttgatcagatgccaacgagacgcgccaaaggttttcgccgcctgaacataggtatactggcgtacaactaatgcttgcccccgcgccaggcgcacataaaagggaattcgcacaatagcaatagccagcatggcgttaaacaaactcggcccgagagcggcagccagtgccattgtcagtaccaagctaggaatgctcagcataatgtccatgatgcgcatgatgatggcgtctgcgcgtccaccaagcacaccggatagacatccgagtaggctaccaatcatacccgcaatggcaaccacgactaatccggcgagaatactttgctgactgccgaccagtacgcggctaaacagatcgcgtcccacttcatcggtgccaaaccagtgcgccgcagaaggcggcaaaaggcgggcggttaaatcaatggcgttgggatcatgcgtcgccagccacggactaaaaatcatcatcaatagcattaatacaatgatgactgcgctggtcacggtgagcggactgcctttcagcatccataccagttttgcaccgttaaatcgcgtttgtttttgtgggcgtacggcggacgtttcctcgcttagcatcattcaccacctccacgtccgatacgcggatcaatccacaaatagagcaaatccaccaccaggttgaccagcacataagcaaaactaaccacgacggcaaagcccatcactgccgggaagtcgagcgcctgtatacttgttactacccatgcacccattccgggccaggcaaaaacggtttcggtgagcactgcgccatacaacaaatcgcccagcgccaaacccaatacggtaatgcttgggatcaacgcattgggtagcgcataacataaaacgatataccagccgggcaagccgctggcccgggcggtacgaatgtagtcttcactcaattgttccagcatcgcactgcggatctggcgagcgacaattcccaggtgaacgaacgccagcgttaatgccggtaagatgagatgttgcaacgcattgaagaagacttcaccgttgccttcaagcagcgcatcgagcagataaaagccggtaacgtgcgttggtggatccagccagtcatcaagccttccgccgccgggaagaatttgcagatgaccataaaacagcacaatgacgcccagcccaagccagaacgcaggtgtggagattccggtaatggccattattcgcaccagatgatccagccagcgatttcgccagactgcagagagtatgcccagcgggatgccaatcaggagtgccagcagcagggcaccaaaagccagctccagcgtcgccgggaaaaatatacgcaactcttccagcaccggacgcccggtacgaatggatgttcccaggtcaccatgaaacaggtcgctgacgtagcggtaaaactgtacatacagtggctggtccagtcccagttgctggcgaatattttccacgatagcatcgctggcgcggtcacccgccagtaaccgcgccggatcaccagggatcagatggctgataataaacgtaatcacgcagacgcccgccaccacgagcaccagcccccagcagcgttggcgtaaaatactccagaaggtcacgttatttactcatggtattgatattgaagacctgttccagcatgggattgaacacaaagcctttcacctctttgttcatcgccagttggtagtttttctggaacaggtacacataagcagcgtcatcaatgacgattttctgtgcctgctggtagtcccgggtacgctgcgtctggtcggtggtcgcaagcgcattgcgcagtaacttatcgacctcactgttttcatagaagctgcggttacccggcagaccttttttgtcactctcaaaccagtaattcataaacatatacgggtcggcaaaatccggactccagttgccaatcgcaatgtcgtaatcacctttacccactctgtcgcgcatggtggcgttcgccagcttttccagcttcacaatgatgcccagcttgttgagactggattgtgtcgccagagcaataggctcccagttcggatcgttatcggagtagagaaacgtcaggctggtgggtttgctcgtcactttatcccattcggctttggctttcgtttcgtcatggttgtattgcattgccgtcgcatcgtagccccacatgccttccggaatcgggccgcgcatctgttttccgttaccactcagaatgccgttaaccatgccctgataatcggtagaccaggaaatggcccgacgcagatccgcctgattaagaggcgctttgctgttattcagatacagataggtaacgcgcagactcggatactctgccacattgactttattttcctgcttcagggcgttgagttgatccaccggcagcgcatcggcaatgtcaatgtcgccacgggagagctgcaggcgacgggaggcactttcaccaataatttttacgcttacccgtttgaagttcggtttattgcctgggtaatgcggatttggcaccagaactaattgctgacctttttgccagcttttcagcataaatggtccggaaccggcggtattttgcgcgaggaagccgcgagcatcatccgctgcatgttcctttaagaccgccggattgataatggatgcaccgtcattcgccagcgtgtagaggaacggtgcgaatggttggctaagggtaaacttcaccgtatgttcgtcgggagcatcaatctttaaatctttgggaaatgcttctgctggcccctggccgatttttagtagccgctcaaaagaaagttttactgcttcggcagtgacaggtgtgccatcggcaaatttagcattatctttcagggtgaacgtccactctttttgatcgtcagacgctttccagctacttgccagatcgccttcaacgtcggtactgcctttatcaccgtccgttttgtactgaaccagccgctgataagacgggtaggtcactgtccagtcgttattatctattgttaccgccgggtcgagggtttgtggatcggcggccttaccaatcaccagcatatcttttggtacggcggcgtgcgcaaccgggaaatttgtggcaaggacgagcgcgagcaatgtgggacgaaagcttatgcttctcttcatgacagtttcctgattaactgacgtgctgtgtgccaggggatataaaacaagagaattgatcagcgagcagagggtaactcgctgcctggggtaattcgaagtgccaccattcgctggagataccgacaaaaccgccaccagtcattatcgcattcagcaacagccgattgcgctgagcggcgggcgggacggaagggtgataggcatgggagcgctcgtgcatttcatcgaaccctgcgcccatatcgaggatgttcccgtgctcatcacgaagcgtcaggtcgatcgccgtgccacggctgtgattagaaccgaccgtcacatcaacaacatattgcgggtctgggcaggcttgccacaacatcgcctgtgcttgttgtgggcgatacgcatcgtaaatcaccagttgtaacccactcagctgggcgatgctgatacttttcgccagcgcggtaatcgcatccttgtgtaacagacaacgcgcttgctgataaatagctttacctgtgatgttatcagcgcaggcgtatttcaattcgatctccagatcagggaagattacggctaaatcaaccagttcggtggtatcgctcataaacggttcctgtataagacaaaaattgctgcgctttccgcttatgcagatctcatgccatgccgggataagcgccagaatgctggcttaaagttatattttttaacttttgatcaacatttgtgcagcgtagtgcagttttggtgcaagaggggaagttaaggaaggaatctcccggaatcgtagctgaaatcacagtatttaagtgacagtgtcacgttaaatgaaaacccgcgagtgcgggcgagaggaatttgtcagattttcagcggtaacacgctgctcatccagcctggaatttcttcggcgggtagggggcgggaaaagaaatatccctgaataacgcgacagtggatcttgcgtagcatctcaaattgctctttggtttcgacgccttccgccacgacggttaaattgaggctttgcccaatgctggtaatggcttcaagtaaggcaaggatgcgtttttcggtcagacaacgatcgacaaaacttttgtcaattttgatttccgttaccggaagactgactaagcgggataatccggaaaagcccgtaccaaaatcatctacgcttaagcccacgcccatatcacgcaggatctgaatgcgcttaaagatttcggtatcgtgttccatcatcatgctttccgtgatttctaccgtcagctggtggccgtcaataccccaggcgtgcattgcatcagacacctgattaggcagttgattactgcgaaagtgcagcgcgctcaagttcacggataacgccgggatatgaatattctggctacgccattctgctaactgacggcaagcttccgcgatgacccagcgcccaatattttcgatttcaccaatctcttctgcgagaggaataaaccgactagggggcacatgaccatgcaggggatcgtgccagcgagcaagggcttcgatgccgtacagttcacccgtttctgcgaagatttgcggctggtaaaccagtttcagttggttattgctaatcgcttctttcagcgctgcgcctaaaaccaaacgctcttttaccatttcgttcatcgccgggctgaagaactgccagccgttaccgccattcttgcgaatataatccattgcattgtgagcagtggagagcaagtaatcgcggtttttacccaggtcgtagctgatgccaatactcaaggtaagcgggaagggtttatcgtcaatcattatcggcttgctgaccacattccgtagctcatcggcgatttgggtaatgttactgacgtcgttttcgaggctcacgaggacaaactgcgtaccttcgatacgacagagatactgatccggtttgagtttttcacgaaagcgattgaccacttccagcaatgcctgatcggcccacgcatagccaaggctatcaatcacatcctgaatatggtcaacaccgatgagatacaccacgggagagacggctttgtcgaccaggtcatcgaggtaattgtgcaggttattgcgatttggcagaccggtcatcggatcaaattggatgagttgttcaatatgctgacggcttttttcctgttccagcgccagcgcggccatatgctggctgatatctgccacgcgttcgataaaggcgctggtttctgctccactgctggttttaatttgcaggatccccgcaggcgcgccatcacgctgacgaatggtcgcactccagctttgcgcattttgaatttctgcaccgtgggaagaactcgcccagtgtatcggcatcccgttgcgcagtgcgaacaggctaacatggctttcgttgagtacagattcgatgttacgacaaatgatttcccccatttcatgaaatggcgggctgctgcacatggcggcgagaatattgccttcaagctggcgaatctgccgttcttcggtgatatcgctgaaagtcattaccaggttctgcagatgcgcgagcacgtcataaaccgggctgatagaggctttaatccagattttttcaccggtgcgcgtcaacagcagaaattcgtcctgatcgcgggcggttttccatagcaactgttgtaaacgaatgcggttatcggcagggaattcaggaatgttcaggagtgtatcgggctgcataccgctggcttcgctaatgcagtaaccaaacatttcggtaaatgcgcgattgcactgcacaatatggcgttccggatcgaggacaatcaccggtcggtcgagatggtcaacggcaataatcaattgtcgggtctgttctttttgcgccatttctacgctggcatcccgtaccagcgccaggtaataaactttcccctcggcgctcactttgcttagcgcaaaacgggtccagattttactgccgtcttttttctccagctgcagctcccgactcatcccctcaacacgcgctttaccgccttcacggttgtgacgaatgtattcaggatgcgcaggacgcaaatcccgcggaatcagcatatcaatgttattgccaatgacttcttcacgtttgtatccccagagcttctctgcggcggggttgaaaaacatcacttcatcattttcgttaattaacaccgcacccatcatattttgctcaagggcggggaaaaaaatgccatcggcggcattatccgcatcggttagcttcatgattacctctgcatcctggcgcatttaaagactggctttccagagttcaacacggtttctacctcgtcttttggcgatatacagagcttcatcggctatttgaatgaggcgctcatagtcaggatgaccattaaacatggcggcaccgatggaaagactgagggcaatatcttcgccgtttgcggctttcagtttggttttctccacccgactgcgaatacgttctgcggtacgtaacgtttcgttttcagaagcttcagtcaaaacaatgataaattcatcgcccccgtagcggaaaacataatcactactgcggacgttgtcataaaaggcctgagagactttacgcagaatttcatcaccagtgttatggccccacgtatcgttgatctctttgaatttatcaacgtcaataatcagcacactcagcggtgtaccggtccggttggcatgggcaatttcgcgtttgaagatagtcggtaggaaacggcggttaagtaatttcgtcagtacatccataccgacttcgtggcggcttacttcttcaaacaattcacgcagcaaggtaataatttggcttacggtatttcttatctgtaataaaaatttcacccgcagacttctgttattcaaatttctggtgttacgcatggtttgattgaaaataccgtcgaaatcctgaatcagacgggagatatggcctacttcggcaataccactaaaataatgtcgacctttatggttaaaccacaggccaaaatcagcctggcttaaaggcaaactactgcctaaatcagaatccagcaggattttatagataatatctatttcccaactaagtatactggctatttgccgttctttttcttcttcggcgttttccagtaagctgaagatacgatagttttcatcttccttactggcactactgtcactaaaggtaaacgcgcgagtcatcacttccatcgcgatatcaatactgttaatgctgaaatggtagacctgaagtttttctgcggcggaataatcgctagagaagatcaccggatagaggatttttttcagcacccgaaaccccatctcgacaatttctaccggaattcctatgcgggcatgcacttccgcgacggtatgctggatttgtattagcctttcgacatcgtcaacctgggcagaaagcacgttaataatccagcgttccatcgcactcttcaactgccgctcaacttgttcattactcaagaattcttcggcatgcgggtcgatgcggacaattcgataaaactcgatactcagataatgagcatgcgcaacggcaatttccgcggctttagcacgaatgggcggatctgcctgttcgacaagtccggtccactcatctttcattcttttaaaatacatctccataattcacacccttataaggctgggaaatcagacggaatcaaaatgaaacgcaacgtgcgagatcgactaactgcaccatattctcctgaaatatgaagatatactgaaaagaaataagcgatttaggacagtttcaatctacgctactgttcttcagaagagtatagcccatcgtaattatttttcggtgacagcgaatatcgtatggtttttcatattcatacatttttattagggatttatggctgtttaactaagtgtggttaatttgacttaagtaagcatgattattagtgggatagtttaagagggtaacaagccggtgggtaaagcaccggcttgttacaaagtaagaatgggagtttaactgccccagcgactttgcagatagctgaccgcttgttgagtctgcggtttattcagatagtcctcacggaacaagatggtgccgctaatttcgggcacagcatcgttaagatcgagctgctttttcagttccggtacgccgccgttaatcatccagtctggctctatcttactaggttcacccactttatagaaggcgataccgatatacaggcgggtcctggtcggtttaacgacatccgcccaccattttgccaacacgtcataacgcgcggcactccgactgaacggccagtaaatttggggagcaatgtaatccagcaatccttgttccacccatcgacgggtgtcagcgtaggattcgtcataggctgccgcgcctcgggtatcggaaccgagcggatcgtgacttcggttacgccacacgcctgccgggctaacaccaaattcgactcccggcttaatgcttttaatggtgtggcttacctttgcaattaactgctgagtattgttgcgccgccagtctgctttactcgcaaatgcgcctccgtatttacggtacgtttcgttatcatttagccgactacccggactctccgtatagaaatagtcgtcaaactgcacgccatctacgggatagcgggaaaccacttctgcgactatacttgtgatccagtcctgaacctcagggatgcccgggtcgaggacaaagcgatcgccagacgttctgatccagtcgcggtgttgcacatagacgctcgccggttgttgagacagagtgctattcagttccctgatagtaccgggcttcgtattaacgcttacgcgataggggttaaaccaggcgtgtactttcatcccacgcttgtgggcttcgtcgagcataaattgcagcggatcgtaacccggattttcaccaatcttaccggtcataagatcggaccacggcaaaattttgcttggccacagggcggtaccgtccggcttgacctggaaaaagaccgtgtttatgccgagacgttgcagatgatccagtttgtcgatcatcgcctgttgttgtacacgggcccggctggtggggttactaatgttaacgctggaaaccggtggccagtcgagccgagaaaccgtggccagccagatgccacgcatcggttgactgctttgttgcgtcgtggctggtggcttactacctgctggtggtgtcaccatggactctggaggcgtgcttttacaactacacagtaaaagtgccagtgcaactagtatcgctggtcttctaatcgttaatttcttgtttcgggagcagatatccatatgtgctggtttccggtaaacagatgtgcgctcattctcgtacttatccccgttaagtcaatacgacagcaagcacgaaaaagggagcgatgaattatcgctcccttgtcttataaccattcagacatggttagtgtttcttgtcattcatcacaatatagtgtggactacgtgcacgcgggtgcagggagaagtgaccttttggtgcgttctgactgttgattggctccagagtgacgccggtatttgctttgcctttacgatcatgaacagcatagagaataaagggcagggcaagtaccaccaggaaactaacaaccagtaattcaacatacatatcggtagaatcaccctggatgttatccggcggcaggaaggaaacaataaacgccataatactagtcagcagaccgacaattgccacgaccagtttcacccctttaccaccagggatattaaatgtgcgttttaagtcaggatgtttaagaaccaacacaatgtagccaataaacagcatgaaataagcacacagataaatcaccaccgtcagcgccagtgcgatcaggaaggacatgttgttaccgccaccggtattggtgaggatgatcaacgcgatagacgtaatcaccagctggctaatgaccagcgttaccggtacgccatttttgttcattttagcgaatgccgctggcagcaggtttttctgcgctgttacatacatcccgcgagaaggaccaacaatccaggaggcgatttccgccagaacacccagcaacagcagtgcggagatcacgcgaaccgtccactcaatttctggtgccacatgggacatcagaacggtaaaggtttgcattacccctgcggagaggttgatttcattacccggaatgaccatcgcaatagacaaaccaccaacagagcttaagcagattgccgccaccatcagcagtaacatagccaacggatagtcgcgccctgggttgctcatttcattgacgtgggttgcggatgcttctacgcccatataactcaaaatgaaggcaacaaatactaccagggtgcccactttagagaagtcagggaagaaggtcttgctatccatttcgatagcaacgggggcaccggagtgcagataaatagccgctaatgcgatcaaaataaatgcaggtaacaggataccggcgaagaagccaactttagcaattcgcgccgtgtatttcgtgccaccaaactgcgttaatgccagcgcccaaagaatgatgagtgctgcaatagttttggtaatggggtcttcattcagcgctggccatttcaggatgtaggagagtgcccctaacacgaaatagagcatcggaataaaaccaatggcgatttgcagatagccaaaactgatcgctgcaaatccccatctcggccccagagtattacttacccaggcgaagacaccaccttcttcccagccgtcgacggtggccatttccgcagcacaaagtcccacgggaataaaccataaaatcccgcctaatagcaggaagaagactaaactaaagccgcttgttgcgaaggtagggtattcataaacagccattaccatgcttgccgttatggcaaagaatccaagtaatgtgagctgcttagctttacctgtctgtacacttgtagccatattatccccctaaaacggtattcctgtcggaaccgcacctgttttgttctgaagcgtattcagaacaatattttccgttgctaatgccagtgaacagactttggaaattgtcccgaaacgggttcgtttcgggacaccgttaccgttaaacgttatcaggtatgtttaaagctgttctgttgggcaataccctgcagtttcgggtgatcgctgagatatttcagggaggctttgtagtcttccagcaacagttcagcaaagtccatttcgaagccgcgacgacacataatgcgcatcaccacgatgtcggtggcttcaccgccgagagtgaaggccggaacctgccagccgcgcagacgcagacgttcagagaggtcatacagggtgtatcccggatcttcaccatctttcagtttgaagcaaaccgccgggatgccttcgtccgggcgacccgtacagatgaactcatacggccccagtttggcgatttcatccgccagataagcggcaacctggtaagaggcgttctgtactttggtatagccttcacgaccgaggcgcaggaattcatagtactgtgcaattacctgacccgccgggcgggagaagttgatggcaaaagtaccaatttgaccacccaggtagtcaacgttgaacaccagttcctgcggcagcgcttcttcgtcacgccagataacccagccgcagcccagcggagccagaccgaatttatggccactagcactgatgcttttcacacgcggcaggcggaagtcccagacgatatccggggcgacgaacggtgccaggaagccaccgctggcagcgtcgatgtgcatgtcgatgtcgataccggtatcggcctggaatttatccagcgcatcgtgcagcggttgtgggaactcatagttaccagtgtaggtcacgccgaaagtcggcaccacgccgatggtgttttcgtcacaggcttcaatcatgcgtttcgggtccataaacaactgaccggggcgcatagggatctcacgcagctccacatcccagtagcgggcgaatttatgccagcagatttgtaccggaccgcacaccaggtttggtttatccgttggtttgcctgcagcttccatacgcttgcgccaacgccatctcatcgccatcccgccgagcatacaggcctcggaagaaccaatggtgttggtgccaacggcctgaccatttttcggcgcaggcgcatgccacagatcggcaaccatatttacgcaacgcaggtcgatggctgcggattgcggatattcttctttgtcgatccagtttttgttaatggataaatccatcaatttgtggacattttcgtcgtcccaggtctggcagaaagtggccaggttctgacgagcgttgccatcaagatataattcgtcattgataatctggaatgcgacatcgtcgcgcatttcgtgcagcggaaaacgtttactttctgcgatagtggaaatagacttcgcaccaaaacgactatcgagtagttcgctccttaaatccgttacttgcttcttatccattttaaactccttaaaatgattggatcgcattaaaaaagtaggatttatcgataaagtaagcaagtgcaaaggactcgtgtttaaataacaaaatcctaatgttatttatcgtgagatattacgcgaataatattttttcattgaaaaacaatacaatatgaaattcttgggtggtggtaaggtgttttatgctgttatttttatgcgcattctgtgtctcctgaattatcacgtaaaaatcagaccttaaaatatcactattagtacttgattattattttgaacgcatttataaaattattacataaaaatagcgaatattgctaaaatccccgccaacgatgtgttgacggggctgttattattttggcaataatactccggtataagtatttaccggatgagaaagatattgtttaacggcagtgttaacattctctaccgtcatttgtttcaacaattgctcctgctcagtccatgctgcaggatcgtcatattgaataagactatttacaatagtgttcgctaattgttgaacgctacgctgttggatatcgaggctgcgctgaacgttttgctggtattcattcagttcttgctcactgatccctttagccagacgcttaaccatcacttcattcgctaacgttaacagttcatcatgtcgttctggttgacaagtaaaagccagcaaatgactgatatctttggcctgaggatcaacgctgaggcgagaagaaacgctgtatgctccagatgcctgttcacgaatattaacacgtagatcttttgccagtgcgacgttaaaagcatcgagcgccatacgcgtcggcagattaacaggtgtccgggaatcataacgcttccactgactaacctgtgccacaggttcattttgttcttttacagtaacgcttgcgttgtccgtcgcgcgagttaatggtttacctgcggctaatgggctatcagagtgtttgatacttcctaagtaacgcgtaattaacgccacgagtttgtcttctgcgacattaccgacaatgacaaacgtgatatccgctggagaactaaacaattggcgatcggcagccagcgcatctgcggcagtaaactgtgcaatctgattttcttgcagtaatttcgtgcggtcatcagcatagcgcgtctcatacatctgctgggcgaatttctccgctggacgctggtcgagcgttttcaacgcctgaatttgagcattttgtaggcttgcccaaatattatcgttaatcgtgctgtgggtgattcgctggttaatcaactgaaaaccaggttcagggttattagtccgcgcgctaacggagagcaacgtattcatgccactgactttactgctcatggttacgctattttccgcactccagcgtttcaggctggaagaggagagttcgccaacgccgcttccgctaactgctttatttgccagcgcgataagacttttttgctgcgcagggaaacttaaatcgcctttattgcttacggcaataatttgtagcttttgctcttcacccgcggattttgccagaataaccctggcaccattggaaagtgttaaacttgtcagattctccgccagcgtttctttgctgctaatttccgcctgtgggtctgcgtctactgttaagcttaaatttctgcctgggaagacgtaagccgccagctttttgttggcgtactccttttccagcgccaggatagccgcaggagacaatgcttttttggcggcaacctcattgtttaccatttgctcccaaaatgcgtcctggttctttcttaactgctgccatttttccgccagactttgcacggtaatttgctgccacagacgtttgctaagttgatatgtctcttccgggctcaagaacggcgtattatttaaactgctggatgccaggcgactggtcagcatacgtaaatcacgttcagcttgctgatcaaccgcatttttcagccaggtgaggcgggtagatttgacatcatcgagttcttcagcagaaaaaccatgctgatcaatggttgccaactctgccattaatgcattcgcagcatcctgcatattatcgtctcgtgcatttacacggaaaaacaggctctgataatcgggtgcaattttaacgctgcgcgcagtgccgccagaaatagtcttcaactcgccgctctgtatgcgttcctgcagacgttgattgaacagctgaactaacatgctccattcagcttgttcgataaagctttgctcatcgttcacttgtaccattggcaggcgataatagagtgcgatgccgttcacccggttttctttatcattaatgatattaaagcgcaggtggttttcggcttttgtcggccagacgcgattttcagctgctttgttagccggaagcttacttaaattatcctttatcagcgccagcgcttctttactgtcgatatcgccgaccacgataaaggtcatattatttggttgataccagcgttgataaaattggcgcaattgtgccggtgtgaccgtggcgacagtatccatcaggccgataggttcacggtctaaattacgggtatttgccagcaggaaagggcggcgcgcctgagaggtgcgccatttcgcatcctgatgggcacgccattcctcagtaattacgccacgttcagcgtctacttcgagtttttcaaaggttgcggcattactccattcactgaagattgccatcacttgttgcagattttgtttctgcgtagtcggcaaactcacctgatacaccgtttcgtcatagctggtataggcattaacatcgcgaccaaaacgcaggcccatactctcaaatgtttcgatgactttattacccggccatgtttttgtgccgttaaacatcatatgttctacaaaatgagccacgccgagctcattgtcttcttcctgcaaactaccggtatgaatttgcagccataaatttacctgatcctttggatgagcatgcggataaatcatatatcgcaagccattgtccagttgcccggtaattaacttttcatcctgcggtaaggcggcggcaatcagccgcccggggagcaacagagttgccactaacgtcagtaagaaacagaggtttctcataattatctccatgcgaaaaccgggcgaatttacccggttaagtaaaatccgaactattaaaatttcatgctgacatcaagccagaaagtacggccactggcgtaggtcgccacaccggtgttcgttgtatcaacagcggttttgctatccagtacattgagaatatcggcactgatcgtcaggttttgttgttgcagaaattgtggcgtccaggacaagcgggtgtcccaggtcaggctgctatccagtttttcgtcaacatactgcttgtaatcactatattcgctgatgtattgcgcatttgtcttaccaaggataatgcgagctttacgcgcttcttgccaggccagcgtattcgcccacactaacccgctcggttgatgcgtgaaatccatgtttaaggagatctttaatgggttattaaaatctgccactggaacgctatcgtaagagaccagattaccgttataaaccacctggttatcaccggtattgctctcctcataaccattgtttaagctcaagttgcccttgctcttgatatagctaaagacaatttgtgggttaatatctacctggcggatatgcaggggttcggccagttcaaaactgaggctgaagctatgcgttttggttttgccatcgttgttatattcagtaatggtggttttagtcgcgctgtcggtacgactgcttttgctgatttgatcatgcgcttcacggtaaacatagtttgcacgcgcaataacgttcttaccgattttctgctgcaatcccattgccagttcatcgttataaggcgttttcaaatcctgataacgcgtcagagttttattaccacttacgctttccgtccagctattgcggatatcacgtaatcccatatcaagaatattcccgccatagtaacggttataacctgctgtaatcatactggtttgattagcaaaaatatcccattccgtcataaagcgcggggagatattgtggttactcagatagttgtcatagtcataccgcacgccgggcattaaactcacattacgccagctaatgcgatccgccatatacagcgtgtagttgtcaattcccaggcggcctttacctttatggtaaatggtatggttagttttctttccggcagcattaatcacataggattcagactggttatggcgttcagtccacgcatcggaatagatgtattccgcgccgaagtagggttgatggctaacattacccacggcgaatttttgccagtccaggcgtgttttgaaggtgtaattatctacagcctgggaaatgtgtcctaatccgccacgggtgcaacgccctgtaatatcaccatatgtacaactaagttcggtgtaccagatgtcatgatcgtgacgggtataatcactaatatgatcccaaccaacggtggtacgcagtttggcccatgcgagctgcgtatccatatcccatgccagaccataggatttattacccatttcgcgatcagactgcgggaaggtgctggtattataatcacggctggagccggtatattttaaggttaaatcgtgggtaaagcggtcgctggcaaaccaggtaaatttgcttaatgcagtatcgataacgtttttatactgtgcccgaccggcgacaatgccgtcattgctaacataatccgcgcgggtgatatcagactggcggcggcttaaaccggcggtaacgccgaagttatcagcgagttcctgattaaagctcaaggtataaaagttctttttaaaatctggggagtaataagtacttccactagagccttgattaaatgcgctcttgttattctcatcgatatggcttgttaaccagtcgctacgcgtagtgcgataacccaatttcaccttgctatcatcagcgttgaagcgtttgatctttgcatcaattaccccgccattgaagcgaccaaattcaaccggcacaaaactgtcataaagcgtcacattgtccagtaagctgacatcaagataatacccctgactcatcccgctaatattggttgcactactggcatcggactcattcgctgggttcaggttattagttgcactaataccgtcaatcaaataggcattctggtaggggctcgcaccgtgaatagagattttctcagggcgaatatctccctggttcaagctggtactttgcgtactatccatgcgtaccgcagggttggttctcagcagatcgctgatattgccattcccggtcggtaaacgctcgatgctttcactggtgtaatgcgtgttgccgtttacgggtacagggacaggagcatagaccgtcatctcttcaaaaaaatgcatgtacatgtttttgtcatcgacggcctgcgccacatcagcgccacataaaatgacgccaggaataagaactcgcttcatttatttatatctccgtacagcagggcttttattgtttttataaaaccgcgctaatgtcacaaatatcatcggccaggttccagacaccgggttgatgtgtaaccataatgacgccgcttgtgggtagtttttcacgcactaaacgcagtaagcggatagcctcttgttcctcaagatgagaggtagtttcgtcaagaaatatccatttcggacgtcgtaaaattaatcgtgccagggcgatacgttgtttttcgccgctggaaagaatatctccccagcgatcgtggtcatgaatacgcgcagccaatttcccaagaccaacctgatgcagtacttcgctcaagcttttatcgtctacgggcaggggaagtgctttacaaataatctctttcagtaagccggttttgattaacggtgtttgactcacataccaactgtcagcaggagaagaaatatcacctttaaaccacggccagcagtgggataatgttttaagcagtgtggtttttcccgcgccagagtagcctttcagtaatagccatttgcctgggctaacatgaaagttcaggttctctaatatgatcttattatcaggcgtacgaatactcgcatcagccacttgtaccgcatgttggcaatttttaggcttattcgtagggcgctgttcagtgagttgatggaactcatacaagcgatcgataaccgcagccagttcagcaagttcgtcatatttataaataaaccagcttaaattgttgcttaccagcataaatgcctggcggcttttcatcagtccgcccagattgatctgcccgctaataaactgcggcaataacagaaagtagggaagaacgctaaggctgcggctataaatattctgccagtaatcaagccaccgctgacgattcattaaacgatgccagttctctttaatggtatgaaaattgtcgctcaactcctggcgttgtagagactcagcattgcttagcgcaatcagttctgcctgcttattatgctgcacaagatttgttcgaaatgtcgcttcgctacgttgtttttccacattaagcggacgaatacgtttacccaccttatgggtaaataaagttccaccgatcacaatgagcacgacggtatagaccatatacccctggatattccattctgttccaccaacagtgaaactgagcgtacccgcgctttcccaaagaataacggtaaaggtgatcagcatgctaagactctggatgaagccaaaactaagactgagcgttttgctgatcagtaagagaatgtcttcagcgatacgttggtcagggttatctgtatttttatgctcgccgtagatctgcgtgaagtagtagtttttatctgcaaaccaccgattaaggtagtaatctgttaaccattcgcgccagcgaatagtcagtagtttaattaaccatgttttgtttacggatattaatacaaagatccccagcagggcagggaaccaaaggacaagctgccaaagcttatcggtttctttctggcttagcgcattgaaaaaatcattattccagtcgtttaaccagacctgaattttaaccacgccaaggatcatggcgaggataataatgattaacaacacactagttttattattcttacgcagccaaaagggcttcaacagacagagatactttgctatcaacatacgaagcgtaatgggaatggttatcattagcgaaaattgattgtgccatccaatgattatctatggcaatgatttactgatgaaatttatttaagtatcatttaacaatatgaaatataaaggaatatttcattttcagtggttatggttatgctattgataatcaaggatattgctaatgccctgatgcataccacgtaagccaggattttcgcaagggaagatgatgatgacgaaacacccgacaggaatttatgtcgggtgccttgttaaggtcataagaaggaggctaagaatggagttaaaagagagcgttattaattattctccatttgttttgcaacatccataatgtggtaaagcggtactctgttcttagctaactctaccatggcgttcatataaggtaccatggtactaaaaaggattttataaccttcgcaaaaataagaaacagtctcattgtttactttagtaatacgatgcttaggacaaccgccattgcagataggtttatatgcacattgctgacatttcgctggaatccgttttttttgcgctgtcagttgtacactgttcatcgttttgagttcagatttattaatgtttccaattttgtactgtggatagacaaaatggtcgcattcgtaaatgtctccattactttcaacaaccagattatccttgcaggactcctggaaaatacaactggtatgcccattccccaaaaaacggctgacaaagctttcaaactgacggatgaaaatttcacccacatcgtttttaacccattgcataaaaatggtactcataaacttgccataagccgtgggaggcacagaaaaatcaatgatacggaatgtgttctcactatgaccactgaaatcaatattcggcgtcccggtttctagcaattcgataaattgcatatgtttactgccgatagattttaaaaaatgataaacctcaagagggtaatggacattaacgttattaatgacggttaacgtattaaactctacttgataacttttcagacgctcgatggctgctatcacttttgcaaaagtaccgttaccactattactgcgtctgtaacggtcatgtaactcctgggggccatcgatgctgataccaaccagaaattcatgttctttgagaaaggcacaccattcattattcaataaaatgccattcgtttgtaatgcattaaaaatacgtttttggcctgcatagcgttgttgatagtgaataactttacggaaaaaatccaggccagccagagtgggttcaccgccttgccaggtaaaatagacctgattgccagacgctgcgatatattgtttgatgaactctttcagagtgctgtcatccatccatttttcatgagtaaactggctctctttttcaaggtaaaaacagtaatcacatttgagattacattgaaaactggagggcttggctgtaacgtgcatcgctatctcgctcaataaggcggcggaaaaatccgccgcatgaaggtttagttatttcgcttcgcttagtgctttcttgatattgttaaacttctcctgatttacctcgctaagcggtggctggctgctgtcgataaactctcttaccacgccttgcatctctttaacgacctgcggattggcggcggcaaggttatctttttgctgtagatccgtcagtttgtagagacctaactgattgttttctactgtatagacaaggctataatcgttatttctcaccgtataagagaattggcttaagtcctcagtgttggggttatgcgggtaatcgtcactctgatggcgaacaaatttgtggtaattatcccagaatggaatattttcctcgtcaaaccagtgagaataagaggttatccaggtcagatttttatgtggctcgccttgtttcttatcttgcaaccagggcagcaaggaaacgccatccagcttaaggtcttttggaatgctgatatcggctgcatcaagagctgtcgggtagaaatccattgcggaaatcagcttgtcataattaccgggttgaagttttcctttccaccacataaacattggggtgtgagtaccgccaggataggtctgactcttatagcctttttgcgccccgttcagcggcagaggaccatcgataaccgcaccattatcggaggtaaagagaataattgtattgtcatactgtccgtttttcttcagttgttcgagaatgcgttttacaccctgatcaacagaataaacggaagcgtagtagttatctgctgtttgactaccggtattaaattgcttctgatattgatccggtgcaggattatcatttggcaggtgcggagcattataagccaggtaaagcataaaaggctggtcaagtgttttggcacgatcaacaacgccaattgcctcatcggttaactgatcgctgatataaccttttgcggggacacgttcacgatttttgaacagactaggggagttgtaatatgccgttcctgcagcgtggaatcccataaagtaatcaaagccacggttttgaggttgccattcttccgcagaaaatgtggtgaagttgtcatgatagtcacgcgtttgtttatcttccggtaccggcacattactgattttactcaagtgccatttacctactgctgcagtgtaataaccatgattctggaataattcaggcaagaaagtttctgttagcggaataccatcctgagcatcggtattggaatagacaccaaagcgggcgggagctcgaccggtcattattgcggcgcgggaggggccggaaacaccgtgtgccacatagccgttagtaaaacgtacgccttcatccattaaactaaggagcgtcggcgtacttttttgtgcagcttcaatggctttatctatccctattttgtaggtatcgacaacttcacgattttccattgtttttgggtcaaaagatcccttatcaaaaggaagttgtccataaccaagatcatccatggtcagtacgataatatttggctttcctttggtactgtattctgtcggcgtaaagtcactgaaagcaacgtttgttttggttgctttcagctttacatcatctgccgcatgagcagcaaatgcagccataccagatgccagtatcaaagatatgctggtacttacgacacttttctttaatgcagacttcataaatgttcctcttcttattgtacttaattccaaagtaattttacgaagagaaataagtggatgtaagtgaagttagtcacataaagagatagcagatttagctaaaaaaagggaaaaaacagtccataaagcgttgacattactttctgttctattaagtaatttctcgccgataaacaactaatttattgatatttaataaattattgcattttactgacaaaatgcagaattgagatcataaataatcatgcaacaggttatgcaagtgcataaatatgtgatggatgtcacttatttatttcaataaatatatcgcctaaaaacaacgcggggcagggaatggctgccccatttaattcttacgcagcgtgtgtggttgactactcgttagcaaataatcaaatagctaaagcattcatcgtgttgcccgtattcatacccgtgtgactttgacaacggtactccttagaaactctcttcggactgttgccgaaatgtttgcggaacgcataaataaaataagatgtactggcataaccacattgttcggcaattttattgacactaccttctacgcgtatcaaattttttgcgtgctgcattcttgcatctaaaagaatctgactgaatgtcgtttgctcttgcttaagttttttcttcaacaggctttcactgatgtacaggcagtcacaaatatctttcagcttccatgggtgcgccggcttcatgttgacaatatttctcactttcccagaaacggatagcacaccgttagttaatagtgtaatgaaacctttgcatgcggcaaaaatagacaggcaagaaaaaagcaaaagttcactaaaattatgatgattgcgttcttcgctgttgagataagcaatcatttcattaagcaatccagtcggtacattactagcacgtaaaaacttcgcaggaacaggcaccgtcactgtctggatgttagtgcattgtagatattttttaatggtattttcagtaaatccgatctctttaaaatgccgctcataaggttcaaaatgcgtacgaacagcgttatctaccatcaggatctcgccgtcagagaaggcgtaatctttatctaaaatgttagcgttgaaggcatgatgaataaatataacagaacaaacgaggctcattttatctccttaaaacaataaagtttttatcgatacttttttaacatttcatatttataatttgctgtttgttttcagccttgcaaactattgataatgaaatgtgtaagatctcttgcaatgcgacccatttctgaaatactcagctgatcaattgccgaaaaaatggctatcaacgtaagtgtcagtaataagacaaccacaattgcagacatgatttctttatagttgtctctttgcgtgattttgtttttcactgtggtcgcatgcatttcaaatatgtttatttagcggataacgttaaaaatcgttaatcagtatgcttaatataacaggctggagaaaagaggaaataggactggtgcttcagtactgagcggagtttcttacagctgtaggcagaagtttatatcttatagtatgtagtttaatttaatccatgtgagcaaattgcgaaataatagtcaatgaggaattcttctgctgtgcggatgacagcagaagaaatgagaagaggcattaattacttggttctaattcaaccggaatacttttatagccaggaatgccacttaatggatcgtggttatcaagtgttagcatgtgattgctttctggaaaataggtcaccagactgcggtcagccatagagtaaatgaccacttttaatctatccatgcggcgactgctgcgcttaccgtctggcgtaagcgcaataagattaactctttcgccgttttttacacggcaaattttagcttgtttagcactcataaagaccacatctcgttgaccgaatacccctcgatagcgatcatccataccataaatcgtcgtgttgtactgatcgtggctgcgtactgtcgccatgaccagcttactgttaaacgcactagagggatcttctaacagccctttgctggtaatgaaattagccttaccactcggcgtcatccagcgcctttcagcagctgcatttatcaggtgaaaaccaccgggatgacggatgcgctggttatagtcggcgaactctggcagcacagcttcaatgtcattgcgaatgcgatcataatcttccaccagatactcccaggctaccacgctctggggtagtgctgcctgcgcgattcccgcgaccactgcacactcacttttcagcattacaccggcgggttttaacacgccacggctggcatgaatcatgctcatactatcctcaacggttaccgcctgcgcaccgtttttttgcatgtcaatctcgctacgtcccaggaccggcagaatatagctatgccgtgcggtcaacagatgagagcggttaagcttagtggctacgtgtaccgccaaatctaattgcgttaacggtacagcgctcgcttcccgatctggcattgccagcgcaaaattgccccccatgcagatcaatgctcgagcctgccccgtacatattgcttgcatgctggcaattgcagcatgtccaggtgcatgaggtggggtgaagccatagcgctcacccagacgagccagaaactctgcagacggtttctcggtgataccgacggttcggtcgccctgtacattagagtgtccacgtagtgggcagatacccgcaccaggcttgccaatgttacctttcatcaacagcagattgaccagttgctgtacgttctgggtaccatgttcgtgctgagtgatccccattccgtaacagataatggtgcgttcggcagcggcatatgcgtcagccagttcggcgatttgtgtctgacttagtccagaaatacgttcgatatctttccactcggaattgagaacgtcacggcgtagctcgtcaaagccgacggtatgcgtttgaataaactcgtcatcaagcaaactaggccgacctgcggcgcttgcagcatcatcgcgctcaattaacaggcgcatcatccccttgagcaacgccatatcgccaccaatgcgcacgttatagtaggcactggccaactgagtctcagagttcgtcagcatttcaaacgggttttgcggtgcggtaaatcgctccaggccacgttcctgtagaggattgatggcgatcattttcgctccccgtttcactaaagcgcgcaagctagtcagcatgcgagggtggtttgtaccagggttatgcccaatgcaaatgactaaatcgcacttctcaaagtcttccagcaacacggtccctttacctacaccgatactcgctgccaaacccacgcttgtcggttcatggcacatgttggagcagtcgggaaagttattgctcccgtattcacgggcaaaaagctgataaagaaaggcagcttcattggaagtgcggccgctagtatagaattcagcctgattgggatcactatagctttgaaggcgtgcgccaatttcgtcgaaagcttgttgccagcttaatggcttgtaacagtcgctgacggcatcatatttcaaaggctgagtgagtcgccccgcagcctcaagctcgtggtctccccaggtaagtaaactttgaaccgtattctcagcaaagaaagaggcgtttacctgcttatccgtgacttcccaggcgattgcttttgcgccgttttcacaaatgtcgaaactcgcactgtgcttaggatctggccatgcacaacccggacagtcaaagccctctggcttattcatgtcaaacatggcaataacatcctggcgtatatccatctgcttacgtactgcattcgctacggatttaacagcaccccaaccacctgcagcaccctggtaggattcaatttttttcttcatctacttatcctgtgtggaaatgaattattaggatttgtaatagcgatgatgcacagtacatacaaagggattatcgccaacatggatatataagagtaggggactactctctttctatttttaatctattatcgttaaacaatagattaaatacgataagttaagcatcatctctcatagtgtttaaattaacatatttttcaatataaaaaataagactctggcttcaattgtgcgcggattttcttacaggtgtaggctaatagccttcacaaaataattatccgcgcaattttcgtgaatggagcgcatagactaaggtcaaaatcacaattattcatagataaaagtgacaccaatgacactctggacggttccggcactaaccttgtttcctgtttgtccataggttgcgcttaaacccagaggtactttgcttttatttactgtccccagggagacattttctcccgtagccagtatttttccattacgcattagagtgacacccactccgcttgcttttgttgcatcaggtgctgtgttagcaaacacttgtcggctactgtcagtggtggcaccgctaagataaaaactgagcttttgttcgctactgcaatatacgccaaggggtatttctgcgcttccaggaaagtccgggagatccacggtgacatttcgactatcaacggtgcagccgcctgttggcataacaacattgttattactaataatattccacgtaaaattacgcggatttccgcttcctaatgttgcaattttatacatatgaatacgggcaatgacttcccccgcttttatgacaactccaccggccgccccaactggggtaatatagagttttaacggtaatggcatcggtgtcttatcaccaatatccaatacgttggtatttgtcgtcaacgggaaggggtaggtcacattattccagtacaggcttcctttataactctgtagggagcctgcgaaagcactgccttgtaccaggtttatatgatcagtgtcgtaccagccgccgtaatcattccagcaacttatatgctgagacaagtctacaaccagattctggcccggctgtattacagggtcgagattaacataaacagaggttgtacctgctccaatactactcccgccatcgacattacaactgaaggcaaaaactttgcctgccattaatagaagataaataccgaacaggacctttatactgattgttttacccatgatatatcctaaggttaaaaattgatttaaaaagaaggctaagaaaatcgaatcgacgttattgccaggtgtagatcacattgattagcgcctcgatcgttccctggcttgcgtttccattcaccgtgatagctcttgccttaagtggaaactgtgcattacgagtgatctcatcaacaataaccgttttgctatcgccattttttaacgcagcatcctggtcatccctcagctctatctgaatattttcggcagtaccttcatttttgtaataacccgtattgtcagtactacctgtcacgattgccgtcactgcacttgtttcaaccggacaatcggttaaactcaaagtaatattgtgccagccagatgcagaaccaggttgttgcagattgcgcgtataaagatccccgagattaacgttagcttctttggtttgaatagtgcagggtttagcgactacccgaccattaacagtgatagtgacatcggcggcctggagagttgctgtgaataacgcgcaaaacgtagctaacaggaacctcttgtgaagtcttttcatatctgactctgattattgaaattcaagggtaaaggttgcgctagccctcaccagtcccggattgacggacttctgagtactcttcagacgagcggagtaaggcaaaatattgttctgttctggtaccagtgggatccactgcatcccggcatgaagatcattcagtttcaccggacgcatatttgcgtccaatatttctatacccaaaccggaggccgtattgcttccttcatccagtttcaacaaagtattattttctgcatcctcaataccgttaaatgcaacccgaacccccgttgtccctttgctgcattcacttaacgtaatctgaaaagggacggctggacttgtgctaccggtcgttggaaattgtctggcactgtttttttggagatctacggtaaaattaaggctatcgctactgactgtgcagccataatcgaggacgcgcccgctaattttaataacgctatctgcggataaagcagaataggtggttaaccccagacataaaccgaggaaaataatgttattgtatttcataatctattgttccttagcgacagattgctgtctgctggttcagtaaggtaccaggagaaacttcaggaagcttgtactcgacaatacagttactgtttttatctttgccccaactaacctgtaattgcccactctgtggaagtccagtcagataaacctgaccattttccgcgacaatgctgccatttttattctctccgtgtgtgacaattgcaccgaatggaacgctcttattaccgtacttcaacgtcattaatactttcccgccgatttgtgcattaaatgttgctctggcaatagcaccgtgagttgggatgacagtgaccacggtttcatccagttcaacattatctgcaagggaattcgcgttaagagcaacacggttttctctatattctgtcgcaaatggtaatatggcatagccacgccagtcggtatgaattccggtctggttctctattttgacattatcagcaccaggagccttaaccagaaccattgtgtcgcccagcggctgtccaaaggtgatgccatcagcatgagcaataatcccaccactcattccgtaataaatctggctgctgtcaccactccgactgtaaccgacattagtattaccataagctccacgataattaagagaactgtaaccactagtgccagagcttgtattacctccgtgggtgttaccgacctgaacgctataattcaggttattatccggcagcagagtgccataaaccccgcttagattggtcatgccgcctttcaaatcgttactcatactgtaactggcgttactattacgaaatgcgctctgactgtctgtacgcatccaatgactgaagggaacattaagcgtaaaagcgagtaaatgatcccgatcgttttgccatatattattggaatagctgtaattcaggctagtcgtaatatcaccaaacggcacatttaatccaaaacttatttgctggtcgctgcgactcgtgttccagtaactttggcgactggcactgaaaaatgtcgtaccgtaatttccaagctgctgagagatgcttatttgttcctgaccacgcttactgtagaacagattaaaataatcaataaattgtgtctgctcattggtgtctccggtaggaggcttgacggtgtaaccactcattcgactgtaggcactgtcggataagttataaaaaccttgcgtagaatagcgatatcctgcgacctggatattggttccacaacaagtttattgctgcacttgttgaagagagtatttgcaaaaacattttatgtcgctaaataacatgacgatttcattatgcatgttatttataaaccgtgactaaacagaatattattgcgaacaagggaagtgtcaggaaaggtcaagagctaccaatggttaatatggctataaatcattagctatggttaatgtttgcttgctgaaactaacaccgaattgctctaaacagataagtgcagggtttattaaagctgtccgacagactttcttaacctggtaatatctctcttgggtgactctccaaacatccgcgaatattcccgacactaatgggatagctttcgtaaccgacagcataggctgctgtggtgacatcgtaatgttcattcagcatctgtcgcctgacttcattgagacgtagccatttctgataccggagtggactcattcccgcttgatccgtccttaaataagtaacagcaccctctggtgttttcgtatgcagtgtctatgcgacagacactgcgctcttagcatggggcagggaataaccaggctatttctccatgcacaggccaattatgaaagaggagaggcttaagttcttgaaccctgaacgaataacgactaccagaaaagcacttcgcatcactcagacatgatttaacataatatacattatgcgcaccaatataaaccaaggaagaatccagtcgttggcggtcatgattgtcatgctcattaacaatgaccaaaccccatatctcacttactaccgtattctcggcttaaccgtccatgcaacctcaacacattgctttcaactgccgtcaccacgttctccggaaaatctgtcggtaaactagtcttcacgttatccagtgctgctggaatcattctggcaaagtcactcaggatttcatgcatctgcacttccgggaatctcagcacctttgctgtcgccaaaaaatgtcgcggataaattttatcgattgccgtttttttgcctttggatgcgttaagccccattgccagtttgagatcgctgatgtgtattcccgtaccgccaaggaccggaaatgcactaatgatgtcgtaaaatggcgtgagtcgataactgccgccagcctgaataaatacggagaagttttttgcatgaccgtccgttgcgccaatcaaccactggaagacctggaatttcataaaatcatagcgatctttcagcgcctcgctggaccccatcaaaaaagccatgatccgcgcgatgcctgggcctccatcactttcatatttcacgctactaggtaaaccgaatgtctgacacatatcctcctgtggcaagcgaagtaaaaccgttcgctcagcattccaacgcctgtcaaagcgttcgaccgctaacgcgcgcacatttcccgctttaatgatttctgcgtccggaacattcaacccaagttctttcgccagcagcagacagtaatactcattatcaacgctttggctgagatcgagcgtcgcattgggctgcctgatttcgccaatcggtaatttaatgatgtgcgtcgtcggcgttattcctttcggaatgcaccagtcattgcctattctgagcagtgctgtcttctcctgtgcgccagcaacgctgatgcgaaagtcattttcttctctaatcatgcctagcgggatatctgctttataagccgttaatacttcttcaagtctggcttcagtaagcttttcccatgccattatcggatgcgttacggtttcgtcttcgggtattaacgtcacggcaccaacgctgtctcgccctatttcactcaataaatcaaacggttgtctggatttggcatgataacgtttaacgatccggtcacgtacaatcgggctatcgggtaacaggttatcgaagaagttaaatacggcatcagaggtgatattccccctctgcaatggcaggctaagactcaacggtctggcataacggcttgctaaccactccggtgcatacttaaaggtgtgcgcgccgttggctaacttcgttaactcgcctacccgctggttgttcatccaagtgacaagtttaggcattaccactccagattttgctgttctgtactttctgggctggcatttttcgcgtcgcatagcgtcatactgagttcaaggctctgtaaaatcttaaaaaatgtcgtgagcgtggtattgtcagggttgttttcgaaattggaaatcgtcgcctgcttaataccaatttttttcgccagctcgctctgcgtccagccattttgctggcgaaccagtttcattgcattcgccaattgcgttgggctatagatcttctgaaagctcatcatgtcatacgtccacagcaagtttatccgcttaaggggatattataagttttatcctttagtgaggataagtcaatctggaaacacatcttatccgctctacgggataaacgctgcgatatccgcgatcgcggataaaaaggaggatttaaataaggcgttgatgcgccgtttgaagtcggcaatattaagccgcatgccatctcgacatgcggcttatacggtttaccagctatatttcactcccagcatgccctgagtatcgctatagcctttatcacctagttgcacaccgacattcccccacaggctaaggttgttatttactttcgcctcaaccccggtacgtacttcaccgagattacgcgcaccttcacggcctacggtttgaccattcatcttcacggcgtagactttgctattgttgatccagttcgcttcaatgtaaggctggaactcacgctgtttaccatcgtcacgctggtgatggctgttcaggtaggttttcaccccaagtcgcgtttgcacatttccgtcgccttccgtttcaatgcgcgttccgtctttccgggtatggtcggaatctttcacacccatccaggtgatttgcgcctgtggctggacgtaccaggtattcagcgtcccttcgctgccgctaaatgttcccgcttcaaaggtatacccaccctcaacagaggccgtcacaccgcgagaatcatagtcgtcagcagaacggttatcggaactgacgctgttatcaaaccagttatacagcgcccagctgtcaacataagcgccggtcttattcgcatcgttctgataccaggtcgcgtacagcccagcgctgtaaccgctgatgcgcccatcgcttttataacccacacgattactctgagtattactgtgctgattggcgtagcctgccatcacgccaagatgccagcgatcctgcgcgttgctactccactgcgccaaatcgccgcctagctgcaatacatagcggttagcctgagtatttagctgaccgtcaccggccctactacgttcgtgccctccgacatgacgcatccacatactgcttgcgctcccctgagaatgcagactatctgtatactgcggctcacccagacggtcgtgtaaacgatggctaaacaggctgttggctgcggcaatgttgctgatatagcttccggcctccgggcgataaacacttgggccttccggatccacaacagggggattattgatgggatcgggtgtatccgctggcgttacgccgtcccatttactggtcagataccagtttttctcgtcattccccttccctttagccagcgtgtagacgtaagccccagcttcgacagttccggtggtcagcgcgaagttacctgcagaattaccgccaacctcaatgagttcaataccgttgaccgtttgtgcaccgacgccgccaatgttatcaacccgaacgcgagtgttcccttgggtatcgcctttcacgttcatcttatcggtggggctattatcgccgcccagcgtcgcgttgaacgtcatcaggccattgtttccggtatagttgccgttaacggtcagtacattccccggtttccccccttcgctattcatttgaaccgtgccgccattctccaggttgccgccgatagtggttttagcgacacgcagtgccccccccaggcataacgttcatatcacctgcagtggtgacatttccgctcatcacaccgctgttatggatattaatgtgttgacttgccatattaatggcagagtcggaaccgaaagcaatttccccccccacgatatccgtcgtaccctgatatgccgcggaatcgttgttaagagtcaggatcccggtacccagttttgtcacatcaccgctaccgctgatactgtgcgtcatcgcccagctacgctcagtggagatggtgagcaggccattattgataacggaagcatcacccaggtttttctgctcgttgacgctgagcgcgctgcctgtatcaatgttgaattgccccacaaagcggctattatcgccatccaactctacatctgtcctggcggttgcgctcacgatacccttcccgcttatgctattacgcagttcgccagtcacgttttttagcgttaacagaccgtcattggcaatatttcctctgcctaacccctgagtattatcgaggctgacttccgcatttgggctaatgctggttaacgcattgtagcgtgcattaagcccctcgatagccagcgttccccctgtaacattcaggtttccgccacctgtcagttcaccctgactgatcccacctttatttaccgtcagcgccccctctttgaacaaaacagtgctacccatctgcccggtgaatgtctctaccgtctgcgtgcttccattaagatcgacgatggccgcgttgctgatgttcagttcccgggtgttgccaagtgcaccatccgcatcggtacgtaatgtccccatctgaacgtaggttgccccctgatagtcgttctgaccgttggaaaggctaacctgtcgcaccgtattgattgccagatccccttcaccaccgatttttgcgctcatatcggccgttgcgccataggctccgccatgttcggctaacgtcagcttttgcccaccatggatgttcagcgctttcagcccatagttaacgtacaaaccattacctggtgcggtcgtgaggcggaatccataatcaccctcggcgaccaccgttccgttttgcgcaatgtgtaacgttttgtccgcttccacctcgtcgccctgtaaatcacgtaacgttaaactgccaccgctcccaataaccgtttgcgccttcaccagttgaacgccgacatggctatcgtcgtgttccagcaaattgagcgtcgtcagagggttattcgccatgggatcattccacggtttaggcacgtcgataagcacgtcgcccgtcccgtttacctgatagttacggcctttccaggtgtagtcacccgcgccgacaaccagcgtatcgacgctgatatatccctccgcgagcgtcgcagcaggaatatccgtatcgaaaatgatggtacctccattcatggccagtccaccaatggattgctctccaacttttacgcttgtggtattttcactgtcagactgcaacatcgcgtgagtaagcgcagcggtgttgtcgcgttccagagtgaaggtactgtctttcagttgggcaacaccggcgaattcagtccctgttgcatgggtaaagccaaacatcttgtcggaggaactcagctgcactcgcatcaagccatcgcctttgagcgcattggtcagcgtgtaatctcctgcactgttcgtacttgcgagaatgtcgagcgtaccggggtttgcaatggttacttcactgctccccatgcccgttaccccatctgccgtatgagacgcaatggtcaggaggccgtcattgaccagcgttttaccgctataagtattccctgcattgaacaccgtatggcctgcatcatggatcacttttccgtctttatcgtcacctgtaatcagcatatcgacctggtagccggcatcactgttattggtatgattaaagacaaaaacgccttcgccaagaccaaactccactttcgtcgcattggtgataaatccggcatctgccgccgcctcaccgtgagcagcaccaatgtttagcgttcctacagcaggctcaaaaacacctaagtaaacttctccaccttcgacattcagcgtaccgttattcgtcagggttaacgtacccgtaccagatgtccctacgtacatattgaatgtttcaagaagagagttctgcccatccaccctcacgtcgcccttacttttgtcattgagagctatctgtgtatcacgcgctttaactatacctccggtggtaatattcagttcacccgtgcctaatacaccgacctgtagcaattgtgcgttagtagaacttgtctttaaattccagagactgtccgtactaatattaactatccccttaccggaggcatttcctccgataaatccatagcccgtactattaagggtggcaccattactgacatttacgataccgctaccaaaattaccgacattgatacccacagtatcgaagctacttgtcgcatccatcaggttcagtgtgccgataccgcttgctttatcgcccaaaaaagtaatattttggcttacgaacttaccgccatcgctaatattgaggtttccgacgcccgcaacaccaatggtggtatagacattcttattgacctcccacattccccccgtggtgatgctgacattcccgacgccggtttctccataaccgagactacttcctccgttgctgacaacaagcccctgattactgatattcatttcgccgtggccgtcataaccaagattagttccgagattagtgataacggagttcttatccttaacagtaatgttgcctgtgcctgtttctttcatccccgcagtgataattccgctatctactttgccttcactgctgacattaagttcaccgtcgccagcatcaccgatatagatatagcggaaagcttcgcccgttccgaggaaattccaatgccctttatcggtcacgttgacgacaccgtgggaaccgtcctgaacgcccaccaaactatattctttgttattaatcagtccattattggaaatattgactgtgccattaccgaaatatccattatagagtctgcgtaccgtgatgacagagtcttgatcctgcacattcagggttccgataccggtggcattgccaccgataatcgtattttcagccgtaaccaaccccccctcgcgaatagtcgcctccccagttccttgattaccaatttgaaattcaatactggaatcattattttttattagccactcgccacccttttcaacgacaacctggccattactgcccgcctgatagcctaaaatggcgacgatactactcgtgacgtaacccttatccgtaatatttaaactacctgtgccatagctacctatttcgaataattcggtcgtcagaacagagtcctctccctcaacattgaccgtcccgacgcctcctgtgctagaacctaatcttaaatagcctccatcgacgtgacccttctgtttaatattcagcgtccccgttccggattgacccacatttaaaggccttgcattatttccgctatcatacaatcgccaggtgccacccaaaacattaacggtgccctcactgtcctcattagcgccaatgacgctggtagtaatagtggttaaggaggcattaccgccagccaaaatattaagcactccagtgccataccagccaaccaggtaggcatcataagcaacatcagtatcaatattggtaatctgatcattatcaacttccagacttgcaccagacgcactaccgcttagtgccagcaaaacacccagcgtcaatctactgaatttcgttgtcagtccagaggatttacgcaaattaaccgtgcttgttttacctgccctgcgagttaattcgctgcaggcctgaaatacctgtagagtgcaattccatatcacgcgatagattctattcatataaacgctccatatacaaacaatacagccacgaaagagatgagtcgtcagacattaaaaatgaaacttattaaattgtcagaggtctgtattgagtgttagttggaggtgggaaggtgtcaatttggctaatttgctaatgctttcgaattgatagattaaaaattgcatagttcttattttatttaaatatgaactatgagttattgttgcttaataagaaaactgtttctttcaataggaaaattatcatcatcatatttaacaaagaatagcactaattgctaaaaatcgaagtttattaaaccccttttgcatccattagtgtctttaggaatattcgctataaaataagggttgtgcttaatgctttaagaaaaatagcaattttcccttgaatatcgtactggtgatggaacgatgaatctgcaagctggcttttaacaagccagctctaaaagaagggaaataagaataactatactcaaaaactaacagccacggtcatcatgatgtggctgtcaatgaaattataacccaggcgctttccataagctcgtcgtcagtccatgatcaaccagccccagctgatcctgataaactgcctgccacttatcgcgactatcctgataaagttcatgcttttccgggtctggtgtgtgcgtccgttcccagcgaaccaggcgttctccggtttctgccatactactaaaaattccggcaccgacgccagctgcaatggcacatcctaatgcagtggcttctttgaccaccggaatattgacgggtaatccgctgacatcagcgagaatttgactccataatttccctttactacctccgcctgcaaagactaagctactaggatgaatattgctgaaatcagcaatttgctgcaagttacacgcacttacaatcgccgcattttcttccagcgcacggaacaatgtcgctttgttacatttatccgggtcaatggacaagttaataaaggaaggcgcagcgtgataccaggttttaaagcgcattctgtcggagaagatcggcattacgccccagctcccaggcggcacccgactggccatctcttccagcagcgtataggtgtcgatgcctaaacgttcggcaatcagtttttcttcggcacagaaagcatcgcggaaccagcgcatggtgagtccggtaaaaaagcttatagattcagcttgtaccatgccaggaataacatgaggattaacgcgcacgttcatttctgggtctgtcaccggcgcggctaaatttacaacttgctgccagaatgtgccgccaagaaccgcggtttgtgccggacgcacaacgcctaacccaaggcaaccaagctgcacgtcgcctcctccaacgaccaccggagtgcccgccttcagaccgcagagttccgccgcttgactacttaccacgcccagcaatgtgccggtttctttgacaggagaaagaatatcggcacgtaggccagccatatccagcaatgcaggtttccagtcacgggtggttagatcaagaagtcccgtggtgccagcgttagagggatccaccgccagttcgccgctgagcatataggccagccagtcgctgatcatggtgatggtacttgcctgacggtaaatatcggaacgatggtgcgccagccaaagtaatctggggatggcacttaaagccagtgtttgtccggtcgcgcgataaacttcgttttcaaaggtattgttgtgcagttctttaagttcgctaacttcgcgtgccgctctggcatccacattggcgcaggcccagatcggggctccttcattattatataaaacaatgccttcacgcatgctacatgcgctaacggcagcgatatactccggggctatgccggcgttgtgcagcgcctggcgcatacactcacacgccagttgccagtttttgttgagatcaaattccatagaaccaggaacgtccggtactgccagatgccgccactccgcctgtcccactgctatttgattgccttccaggtcgaatatcacagcccgaatacttccggtgcctgcatccagcgccatcaggtagtacttactttcactaagggtaaagagtcgagccattagattatcctcggcttatgcgttctgtctgttcctctatacgttctccatcattcccggtaataaggtcatgcaaatttaactacgtaaaatcgccgctgctgtgtcctgatcggtaaccagtgcgttgatataaccgcctttcattgcagcggcaattgcttcggctttattttctccccctgccacgccaacccggacgggtatggtcttcagcgcgcttaaaggtaagccaatcagttcgttatgtattttgatattcgtgacaacgtcaccttttgcatcaaaaaagtagcctaaaatgtcgccaaccgccccttttcggccaatcattaactgttcgccctggctgatataaccggagcgaatgattgtcgcatcgtcctgttgactcacagcaccaatgccgacaatcgccacatccgctgcttgcgcggctaacagaacatctttgacgcaattttcattttttagcgtacgggcaatgtcagcggaggatgcccgcaacggagccggaataatattcacactgcacgccgcgttaagctgcccgattcccgtcatataagaaccgacgccaccggagagcgtgaccaggcgaatttgctgactgctaataaaaccacttaagcgttgcagcgtattcatggttgcctcgccaaaaccaatcgccagcatctgttgtggttgaagtaaactcatcaacatatgcgccgcgcctatccccagtcgcccaccgacatcagcatccgcaagcccagggatcacccggacatgttgcaggctaaactgacgacgtaattgagtttcatattccagacagccttcaaagcgagaattaatctgtacgcgaataatgccggactgatgccctttctccagcaatcggctcactttcaaacgtgtcaggccgagacgatcgctgatctcgctctgggtcagcccgtcgtgatagtaaaaccacgcgatccgcgcgacctgttcttcttcacacattccctgttcactaattgcgctatcgttgattgtcataattcattcttcactttgaacatatttaaatctttaatgcaattgttcagttcttgctcatttatatctgtgatggcaaccacagtttgactctacgagcatgaacaaacgcaaccgtgaaaatcaaaatagcataaattgtgatctattcgtcggaaatatgtgcaatgtccacctaaggttatgaacaaattaaaagcagaaatacatttgttcaaaactcacctgcaaaactgaacgggggaaatatgcaaacgagtgatacccgcgcgttaccgctactttgcgcccgcagcgtttataaacagtatagtggggtcaatgtcctgaaaggcatcgattttacgttgcatcagggggaggtccacgccctgctcggcggcaatggtgccggtaaaagcacgttaatgaagattattgccggtattacccctgctgatagcggtacgctggagattgagggcaacaactacgtcagattaacgccagttcatgctcatcagctgggtatttatctcgttccccaggaaccgctgcttttcccaagcctgagcataaaagaaaacatcctgtttgggctggcaaaaaaacagctctccatgcagaaaatgaagaacttgctggcggcgctgggctgccagtttgatctgcatagtctggcaggaagcctggatgtcgccgatcgccaaatggtggaaatcctccgcgggctgatgcgcgacagccggattctgatcctcgatgaacctaccgccagccttacccctgcggaaaccgaacgcttgtttagtcgcttgcaagagctgcttgctactggcgtgggtattgtttttatcagccataagctgccggaaattcgccagattgccgatcgaattagcgtgatgcgcgacggaaccatcgccttaagcggcaaaaccagcgaactgtctaccgacgacattattcaggccatcaccccagcggtacgggaaaaaagcctctctgccagccaaaaattatggctggagttacctggtaaccgcccacaacatgccgccggaacgccggtgctgacactggaaaatctgaccggcgaaggtttcaggaatgtcagcctgacgctcaatgccggagaaattctgggcctggctgggctggtgggggccggacgcacagaactggccgagacgctctatggtctgcgtactttgcgtggcggacgcattatgctgaatggtaaagagatcaataaattatccactggagaacgtttactgcgcggtctggtttatctgccggaagatcgccagagttccggactgaatctcgatgctagcctggcctggaacgtctgcgcccttactcataaccttcgtggattctgggcgaaaaccgcgaaagataatgccaccctggaacgttatcgtcgggcgctgaatattaaattcaaccaaccggaacaagctgcacggacattatccggtggcaaccagcaaaaaatcctcattgccaaatgcttggaagctagcccgcaagtattgattgtcgatgagccgacgcgcggcgtggatgtcagcgcccgtaatgatatctaccagctgttgcgcagcatcgccgcacaaaatgtggctgtgctgcttatctcctccgacctggaagagatcgaactgatggcagatcgtgtgtatgtgatgcatcagggcgaaattacccactctgcactgaccgagcgcgatattaatgtcgagactattatgcgcgttgccttcggcgatagtcagcgtcaggaggcgagttgctgagctaaagtcagcgtcaggaggcgtcatgctgaagtttattcagaacaaccgtgaaatcacggcactgctggcggtggtgctgctgtttgtattacccggttttctcgaccgccagtatttaagtgtgcaaacgctgaccatggtttatagcagcgcgcaaatcctgatcctgctggcaatgggcgcgacgctggtaatgcttacgcgcaatattgatgttagtgtgggtagcattaccggaatgtgcgcggtgctgttggggatgttactgaacgcaggatatagtctacctgttgcttgtgtcgcgactttactgcttggtttgctcgcgggatttttcaacggtgtcctggtcgcgtggctaaagatccctgccattgttgccacccttggcacgttagggttgtacagaggcatcatgttgctgtggactggcggcaaatggattgaagggttacccgccgaactgaaacagctctccgccccgctgctgcttggcgttagtgcaattggttggttgacgataattctggtggcatttatggcctggctgctggcaaagacggcgtttggacgcagtttttatgccacgggcgataatttacagggcgctcgtcaactgggcgttcgtactgaagccattcgcattgtggcatttagcttgaacggctgcatggcggcactggcgggaattgtgtttgctagccagattggttttatccccaaccagaccggtaccgggctggagatgaaagcaattgcagcctgcgtgctgggcggcattagtttgctcggtggttccggtgcgatcattggtgcggtactcggcgcatggttcctgacgcagatcgatagcgtactggtgctgttgcgcattccggcatggtggaatgattttatcgcgggtctggttctgctggcggtgctggtgtttgatggacgcctgcgttgtgcgctggaacgtaatctacggcggcaaaaatatgcccgctttatgacgccaccgccatccgttaaacccgctagcagtggtaaaaaacgggaggccgcataatgcgtattcgctacggttgggaactggctcttgccgcactgctcgttattgagattgtcgcatttggtgcaattaacccgcgaatgttagatctcaatatgttgctgttcagcaccagtgactttatctgcattggcattgtcgccctaccgctaacgatggtgattgtcagtggcgggatcgatattagctttggtagcaccatcggcctctgcgccattgcattgggcgtactgtttcaaagtggtgtgccgatgccgctggcgatactcctgaccttactgctcggcgcattgtgcgggctgatcaacgccggattaattatctataccaaagttaacccgctggtgattacgcttggcacgctgtatctgtttgccggaagcgctctgctgctttccggtatggccggagcgacggggtacgaaggtattggtggattcccgatggcgtttacagatttcgctaacctggatgtgctgggactccccgttccgctgattatcttcctgatatgtctcctcgttttctggctctggctgcataaaacccatgccggacgtaatgtgtttttgattgggcaaagcccgcgcgtggcgctttatagcgcgattccagttaaccgtaccttatgtgcgctctatgccatgacggggctggcgtctgcggtcgccgctgtgctgctggtaagctattttggtagtgcacgttccgatctcggtgcgagctttctgatgcccgccatcaccgccgtggtgcttggcggggccaatatttatggtggttccggttccattatcggcaccgccattgcggttttattagtgggatatttgcaacaaggtttgcaaatggcaggagtgccaaatcaggtgtccagcgccctttccggtgcgctacttatcgtcgttgtcgtaggtcgttccgttagcctgcatcgccagcaaattaaagagtggctggcgcgtcgggccaataacccattgccataaaggatatcttcatgacacttcatcgctttaagaaaatcgccttacttagcgctcttggcattgccgcaatctctatgaatgtgcaggccgcagagcgtattgcatttattcccaaactggttggcgtgggattttttaccagcggtggcaacggcgcacaacaagcgggtaaagagctgggcgttgatgtgacctacgacgggccgacagaacccagtgtttctggtcaggtacagttgattaataacttcgtcaatcaaggttataacgccattatcgtttctgcggttagccctgatggcttgtgtccggcactgaaacgcgccatgcaacgtggtgtgagagtgctgacctgggactctgatactaaaccggagtgccgctcttactacattaatcagggaacgcccgcccagttaggaggtatgttggtggatatggcggcgcgtcaggtgaataaagacaaagccaaagtcgcgtttttctacagtagccccaccgttacggaccaaaaccagtgggtgaaagaagcgaaagcgaaaatcgccaaagagcatccaggctgggaaattgtcactacgcagtttggctataacgatgccactaaaagcttacaaaccgcagaaggaatattaaaagcgtatagcgatctcgacgccattatcgcccccgatgccaacgccctgcccgctgccgcacaagccgcagaaaacttgaaaaatgacaaagtagcgattgtcggattcagtacgccaaatgtgatgcgcccgtatgtagagcgcggcacggtgaaagaatttggcctgtgggatgtggttcagcaaggcaaaattagtgtgtatgtcgcggatgcattattgaaaaaaggaagtatgaaaacgggcgacaagctggatatcaagggcgtaggtcaggttgaagtcagcccaaacagcgttcagggctatgactacgaagcggatggtaatggcatcgtactgttaccggagcgcgtgatattcaacaaagagaatatcggcaaatacgatttctgatgtgcattacttaaccggagtaagttatggcagatttagacgatattaaagatggtaaagattttcgtaccgatcaaccgcaaaaaaatatcccttttaccctgaaaggttgcggtgcgctggattggggaatgcagagtcgcttaagccggatatttaatccgaaaacgggtaaaaccgtgatgctggcttttgaccatggttattttcagggaccgactaccggacttgaacgcattgatataaatatcgccccgctgtttgaacatgccgatgtattaatgtgtacgcgcggcattttgcgcagcgtagttccccctgcgaccaataggccggtggtactgcgggcgagtggtgcgaactctattctggcggaattaagtaatgaagccgtggcgttaagcatggatgacgccgtgcgcctgaacagttgcgcggtggcggcgcaggtttatatcggcagcgaatatgaacatcagagcatcaaaaatattattcagctggttgatgccggaatgaaagtgggaatgccgaccatggccgtgactggcgtgggcaaagatatggtgcgcgatcagcgttatttcagcctcgcgactcgaatcgccgctgaaatgggggcgcaaattatcaaaacctattatgtcgaaaaaggttttgaacggattgttgccggatgtccggtacccattgttattgctggcggtaaaaaattaccggagcgcgaggcgctggaaatgtgctggcaggctatcgatcagggcgcttctggtgtggatatggggcgtaatattttccagtctgaccatccggtggcgatgatgaaagccgtacaggcggtggttcaccataacgaaacggctgatcgggcatatgaactctatctgagtgaaaaacagtaactgcggatctaaggagaagaattatgcacgtcacactggttgaaattaacgttcatgaagacaaggttgacgagtttatcgaagtttttcgccagaaccacctgggctctgtacaggaagaaggcaatttgcgcttcgatgtcttacaggacccggaagtgaatagccgcttttatatctacgaagcctataaagatgaagacgcagtggcgttccataaaaccacgccccactacaaaacctgtgtcgcgaaactggaatctttaatgaccgggccgcgtaaaaaacgtctgttcaatggtttgatgccgtgaggcgaatttatcaattttatctacaattggggtaacgcgctgacgggagtaaaaaaatgtctgactggaacccctctttatatctacacttttccgctgaacgaagccgtccggcggtggagctgcttgccagagtgccgctggaaaatgtcgaatatgttgccgatcttggctgtggcccaggtaacagcaccgcccttctacaacaacgttggcctgcggccaggataacaggcatcgacagctctccggcgatgattgctgaagcgcgcagtgctttgccagactgccagttcgtggaagcagacatccgcaactggcaaccggtacaggcactcgatctgatttttgctaatgccagtctgcaatggctgcccgaccactacgaattgtttcctcatctggtttctttacttaatccgcagggcgtgctggcagtacagatgccagataactggctggagccgacccatgtgctcatgcgcgaagttgcctgggaacaaaactacccggatcgcgggcgtgagccgttggctggcgttcatgcttactacgatattttgagcgaagccggatgtgaggtcgatatctggcgaaccacctactatcaccagatgccgagtcaccaggcgattatcgattgggtgactgccactggattacgtccgtggttacaggatctgaccgagagcgaacagcagctttttcttaagcgctaccatcagatgctggaagagcagtatccactgcaagagaacggacagatactgctggcatttccgcgtctgtttattgttgcccggcgtatggagtaaatatcacgtcagctggtaatgacgatcgggaagaatttttgctggaatttcggcttcatcgttcatctgtaacaggtcaatttcaatagcgttgcagatggcatccagtggtaaatcattgttttcagtaccgaacggatcttccagttcttccgccagacaatccaggctaataaaagtgtaggaaatcagcacagagataaaaggcgtcatgtaatgcaggtccacgaccagcgcgaacggcagcatgatacaaaacagataaacggtacgatgcaaaatcagggtgtaggcaaagggaattggcgtataggcaatgcgctcgcatcctgccaggaccgcactaatatcattaagccgatcgttgaggctaataaacaggatatcactaagctgtccattgcggcgctgaaccgccaaccattctcccattattaacaagatacggttagctggagagttgctagccagtacacgctgaagatcttcagtcttgagataatgagccagcacttccgcctgtggctgtttgcgtaatgtcatgcgtaaacagtgggcgaaagcgatttgcagccgggcaaactcccttacacttgcgctatccggcaatgtcgtttttacctcgcgcagtaagctccgactggcaatcatcaactgcccccaaagttttcgcgcttcaacgtaacgggcgtacccggcattattacgaaaaccaagaaaaatggcgatggcgacaccgagaatgctgaacggtgcgagggtgaatttgatgcccagatgcgtgtaccagggcagcatgaaaataacagcgatagaaaagagaaaattgagtagtaagcggctggatatcttggataatacactgccgtgccagacaaaaatacggcgcagccagtgttgttgtggacgaacaatcatggttatcttcaggcgtggaaaagtcgccctattaaacgtgattacgatcacattctcaagacgctacttacaaattacctacaagcttacaacattagcaggcgctgcatgtggcacctgttaatgataaaggcatataggatgttgtaactaatatggtgaaataagaaacccggtcgaaaccgggttcagaagtaacggtgttattagcacaacggacgtacagcttcgcgcatccctttttcgagaatcgcatccaggtcattagcaacctgctcgaccagaccaggcacttgcgtcaggtcctgctcccagtggtctttttctgccaaaacaatcgctaccagttcctgggtgccgataacacggtcacgatgctggctccagagttgctgataacgttccagccagtgtgcatcgtcctgtaccggatatgtttcgccgttacgctcaccacgatagaacgcaatcaatgccgctaatgcgaaagtaaggcgcgccggaagtgtgccgtttgccttctgccctgccagcagctgtggcaggatgcgggtgcggaacttggtcataccgttgagcgcgatagacagcagctgatgcttaatgtacgggttacggaaacgcccggtgactgcactggcgaaagattccagttcatcacgaggcaaatccagtaccggaataatttcttcgtagatagctttttcaacgaatgcgcaaatttcagcatcgttcatcgcttcacctacggtatccagccctgcctggaacgccaccggcaccagcgcggtgtgcgcaccgttgaggattgccactttgcgttctttgtacggtttaatatcgtcaacaatcagcacgttgagcggatatttgtccagacgcagttcagtcgctaaggatttcggtccctgaatcacaaacaggtaaaagtgttcagcggtgtcgagaaaaccatcgtgataacccagttcttcttccagtttagccacttcatcgcgcggataaccggtaacgatacggtccaccagcgtagaacagaagctgttagcctgatccagccattgaataaatgcttctggcagtgcccactcttgcgcatagcgcagcaccagttcacgcaacgcgtcgccattgtagtcaatcaactcacacggaatgatgatccaacctttatccagcgcaccgttgaaatggctaaagcgttcgaacagcagacgggtcagttttgccggatagcttaccgctggcgcgtcatcgaatttatcgcccgcatggtagctgatacccgcttcggtggtgttagagaaaacaaagcgcatttccgggttgtgcgccagtttcaggaattcatcgtattcactgtagacgctgatttcacgattaacgctgcgaatcagacgcgcgtcgctgaccgcttcccccttctcattcaggccacggataatggtggtgtacagaccatcctgcgtgctcagactcggcgggaaactagtttcaatcggacgaacaacgaccacgccagaattcagatcggtgtgctcattcaggagatcgatttgccagtcaacaaaggcgcgcaggaagttaccttcaccaaactgaatgatacgttctggatactgtgcaccgggaaaatcgcgacgatttagtgttttcacaatgggttcccttctgattagtcatacaacctgtttgaattggtacgacaggttagcaaactttaatacgccgaacccctgttttgatcaactcctgatgattaatgagcagttttatgagaaaagtgtggcgcggatcatggtttaatcgaggaaaaacgccttttcctggatcataaagtggtagaacacattgcattcaaatcgcgcgtaatgaataaagatgtcagacaacttcctcaccgtaacgcatagtgctggtacggttgcgcccatctttcttgctgcgatacagacacgtatcggcttcgaccatcaatttattaaagtcatcggtcagcgttaggtagcttgcgcgaccactaccgacgccaatacttaccgtgagataaagcgttttttgttgccaggtgaatggttgcagttcaacgcctttacggattttttccgccattagcagaccatcgacaggattcacgctcggcactgcaacagcaaattcttcgccgcccattcgcgccaccagccccttatcaccgacaatcttctgaatatgccgggcaaacacgcttaacactttatcgccacattcatgtccatagttatcgttaatgcttttgaaatagtcgatatcaagcagcatgacagtcagatgttgtgtctgtttcaggcttggacttttcagcgcctcataaagaccggaccgactgtaaacctgagtcagaaaatcaaagtcggctcgcagcgcaacttgcttcattaggctattgatcgctgccacgctaaaagaaaccataattgggcatatcgccatcgtggcaataccgagacgtgcggagaacatttgcggaatggagaacgggctaccgacgctgatatcaatcacgctatttgccaccagtacgatttccaccgcaccggtgacaaaggtcaacagacatgttacctgcggcgtatagcgcactgcacaccagattaatgcaggcagcgggaacgccagactccccgctccgccaatgactacgctggcaataacgctcacaataagcgcgatggcgggcatcatctgttctgctttaaagcgcggcagcactccaggaatagccaacgtcagcatacaaggcacgatcaacacgcccgtactgaattgctcactgaaccagtccgcaagcaaaggccagaaatccagactatcaatactgaccgaaccaagatagcatgttcgctgacagcggcggcaaataaaggtaccctgggaatgctattttgtcgttttccgcaattctcatggctgattcatctgtacaaccagccagtgatagattaccgccacgatataacgttgttgttcttcgcttaagctaacaccctgcggaatgttatgccacttagccagacaaccgcgacagcaggtcgcggtggcgtgctgagcgataaacaccggatgcccgcgcatgggggtttgcttaccgtcattagccggtaatgccggagcaagacgtttagcgacaaaatccgccgcatgttgttcgatgactggcgcgcctttctccaggcaatactgacgctctttcatgcccagacgaaagcgagagcgaaatttactacgggataaacgcgcgaagagtggatcgagagactgcattaataaacgctacgccctaactgtttcgtcaattgttcaagaacggcaatacccgcaaggctgttacctgcatcatccagttccggactccagacagcgatggccatttcatgcggaacaatcgccacaataccgccaccaacgccagatttcgccggtagccccacccgccaggcaaactcccccgcgttctggtacataccactggtcgccatcagcgcgttaatttgccgcgcctgcattggcgtcaccactggttcatcaatatgaatagctttcccctgattagccagaaagacaaacgtccgggccagctctacacagctcattttcagagcgcagtaatgaaagtagttttgcagaacggttgtcacgtcatgatggaaattgccaaagctcttcatcagccaggcgatagccgcatttcgcgcggaatgttcaaattcggaacgcgctaccaccgtatcgtaggaaatatcagacacaccgcttaagccgcgcacgacttccagcatacgttgccgtggtgcgcttaatcgcccttgcaacatatcgcagaccaccagcgcaccggcattaatgaacggattacgcggtataccctgctccatttccagttgcactaaggaattgaacggacttccagacggatctttgccgacgcgttgccagatttcctcttcggagtaatgacgcatggcgacaacgagactcagcactttggaaatagactgaatggaaaaacgttcttgcgcgtctccggcctgaaaaagctgtccgtcaacggtacagatagcaatccccaatcgggaaccgtctactgtagccagcgccggaatataatccgcgactttaccctgaccaatgagcggccgcacttgccgcaagatgttttctaaaattgcattatccatggcgactgccactttctactcctggaccgcaggtctgaaaagacctgcgagtatatcagagctgaatatgtcgcgtcagatccggtctttccacaccgtctggatattacagaattcgtgtaagccgaaatgggaaagctcacgaccaaagccactctttttcacgccaccaaaggccactcgcgcgtcgctggcacaataaccattgataaacaccccaccgcattccagacgtgccgccatctgtctggcctgtgtttcgtcagtggtaaaaatggtcgcactaaggccgaactcactatcattagccagttccagtgcatgttctgcatctttcgcaatggtgattgccgcaacggggccaaacatttcttcccgaaacgcggtcatttctggggtaacattcgccagaaccgttggcggatagtagttacctgccccagccatcttttccccgcccagtaacaaacgcgcaccctgcgccagggttttctccacctgatgatgcagctcatcacgtaaatcaaaacgagccattggtccgagagcgttctcttcgtcacggggatcgcccattttcaaggctgccgcagctgccacaaaacgttcggtaaatgcgctagcaattccctcttcgataataaagcgttttgccgctgcacatacctgtccggtattctgataacgtccggctaccgccgctttcaccgccagttccagatcggcatcgttaagcacaataaacggatcgctaccgcccagttccagtacgcattttttcagtgccgctccagcctgtgcgccaatagccgctcccgcacgaacacttccggtcaccgtgacagcagcaatgcggctgtctttaatcatctgactgacaccgtcgttgtcggcattcagccagccatatacgccttgtgggatacccgcatctttaaacacctgggcaatgagctgtgcacagcccatcacattcggcgtatgtttaagtaagtagccgttacctgcaagaatgatgggaacagcgccacgcatcacctgccataacggaaaattccacggcataatcgccagaatcgtccccaacggtcgatactcaataaccgcctgctgattttccaccagcgtaggttccgccttcagcattgccggaccatgttctgcataccagtcacacaaattcgcgcttttcgccacttcagcgcgcgcctggttgattggtttgcccatttcgcgggtgatcatttgcgccatttcttcgctacgagcgcgcagagccttaccgatatcacgcagtttttcagcacgataatctatatttgtctcgcgccagtcgcgaaagcctgctgccgccagctgaagtgcgttttcgatatcgtcagcgccagcccacggcagcacagaaagttgttcacccgtggcaggatttatgctaattgcatgagttgccggagtaatggtcatcggggtatctcctttatgagtcatggtatgaagatacgcagatttactcttgctttaaaatgaataatattaagccacttattcacgaatcgagaatgctatggatctgacccaactggagatgttcaacgcggttgccgaagctggcagcataacccaggctgcagcaaaagtgcatcgcgtgccgagcaatctcactacccgtctgcgccagctggaaacagaactgggggttgatctgtttattcgcgagaatcagcgtttacgtctctctcctgccgggcataactttttacgctatagccaacaaattctcgcgttagtggatgaagcgcggagcgttgtcgctggcgatgagccgcaaggtttattttctcttggtagcctggaaagcaccgctgcagtgcgcattccagccacgctggcggaattcaaccgtcgttatcccaaaattcagtttagtctttccaccggcccttccggcactatgctggatggtgtactggagggaaaactgaatgcggcgtttattgatggacccattaaccatactgccatcgacgggataccggtataccgcgaggaactgatgatcgtcacgccacaaggatatgcgccagtaacccgtgccagtcaggttaatggcagtaacatttatgccttccgcgccaattgtagctatcgtcgccacttcgagagctggtttcatgctgacggtgccgctccgggaactatccatgagatggagtcttatcacggaatgttggcctgtgtgatcgcaggagcaggcattgcgcttattccgcgctctatgctggaaagtatgccggggcatcaccaggttgaagcgtggccgttagctgagcaatggcgttggttaacaacctggctggtctggcgtcgtggtgcgaaaacacgtccgctcgaggcatttattcaactgctggatgtgcctgacagcgcaagacagggatatcaatgagctatttttgatagttcttgcggttaatatgctctatatagtgatgttccgatgacttatgactatatggggcaaatatggttacgccagtaagcatcagcaattacatatctcttcctgatgattttcccgtacgtaatattgcaccgcaggtaaaagaagttttaaaggattttattgatgcacttagtacaataatatgtaatgaagagtggcgcacgtctttaaacatcaacagtgccacaaaaaagatatttaataaccttgacaacttaagttatattcagaggacttcttttcggggtaacgacacgctatacaatgaaaaggttcagtttaaactcacttatcccgccaggaatggaagacacaaagaaaatattgaatttcaggtagtaataaatttaagccctatttatttagataattttcgccatgatggagaaattaatattttttgcgctcccaacccaaagcctgtcactatggggcgcgtatttcagaccggcgtcgagcgtgtactctttctgtttctgaatgattttattgaacaatttccaatgatcaaccctggtgttcccatcaaaagagcgcatacaccacatattgaacccctgcctagcgatcaccataccgctgcagattacttacgccagtttgatttgcttgtcctgaattttatctctcgcggtaattttgtcatactcccccgattatggagtaactctgaggttcacagatggttcgtcaataaagatcctaacttgatcaccgccattctcgacataacggacagcgaattaaaagaggatttgttgcaaagcctgatggatagtttaggttctaacaaacatgtactacccgaagtctgcatctgctttttatcccttttagcagaacaagaatctcctcattttcagaacttgtttttatttttcgccaatatgttattgcactatcaccaatttatgaatcccaatgaaagtgatttgaatgacgtgttgatgccagcaagtttaagtgatgataaaattatcaaacatatggcgcgcaggaccctcaaactgtttgtaaaaaatgaaacaccgccaaaagttactcacgaagacctggtgaaaaacaggcctcgctcccctgtcagaccacctatacccgcaaccgccaaaacgccagacctccctgaacgtcattaaaccgtgatgttaccgactctctgacgcgtgaaagaatcagcgtcagagaaacggaaaacgcgatccagatcacaaatgcattgtattcacatcattaaccgttttaagatcatttcatcactttttcgcaactcacccgataatctgttatgacaacaaacactgtttcccgcaaagtggcgtggctacgggtcgttacgctggcagtcgccgccttcatcttcaacaccaccgaatttgtccctgttggcctgctctctgacattgcgcaaagttttcacatgcaaaccgctcaggtcggcatcatgttgaccatttacgcatgggtagtagcgctaatgagtttgccttttatgttaatgaccagtcaggttgaacggcgcaaattactgatctgcctgtttgtggtgtttattgccagccacgtactgagctttttgagctggagctttaccgttctggtgatcagtcgcattggtgtggcttttgcacatgcgattttctggagcattacggcgtctctggcgatccgtatggctccggccgggaagcgagcacaggcattgagtttaattgccaccggtacagcactggcgatggtcttaggtttacctctcgggcgcattgtgggccagtatttcggttggcgaatgaccttcttcgcgattggtattggggcgcttatcacccttttgtgcctgattaagttacttcccttactgcccagtgagcattccggtagtctgaaaagcctcccgctattgttccgccgcccggcattgatgagcatttatttgttaactgtggtggttgtcaccgcccattacacggcatacagctatatcgagccttttgtacaaaacattgcgggattcagcgccaactttgccacggcattactgttattactcggtggtgcgggcattattggcagcgtgattttcggtaaactgggtaatcagtatgcgtctgcgttggtgagtacggcgattgcgctgttgctggtgtgcctggcattgctgttacctgcggcgaacagtgaaatacacctcggggtgctgagtattttctgggggatcgcgatgatgatcatcgggcttggtatgcaggttaaagtgctggcgctggcaccagatgctaccgacgtcgcgatggcgctattctccggcatatttaatattggaatcggggcgggtgcgttggtaggtaatcaggtgagtttgcactggagtatgagcatgattggttatgtgggcgcggtgcctgcttttgccgcgttaatttggagtatcattatatttcgccgctggccagtgacactcgaagaacagacgcaataattgaaaggcccattcgggccttttttaatggtacgttttaatgatttccaggatgccgttaataataaactgcacacccatacataccagcaggaatcccatcagacgggagatcgcttcaatgccacccttgcccaccagccgcataattgcgccggagctgcgtaggcttccccacaaaataaccgccaccaggaaaaagatcagcggcggcgcaaccatcagtacccaatcagcgaaggtactactctgacgcactgtggacgcgctgctaataatcatcgctatggttcccggaccggcagtacttggcattgccagcggcacaaaggcaatattggcactgggttcatcttccagctcttcgctcttgcttttcgcctccggactatcaatcgctttctgttgcggaaagagcatccgaaaaccgataaacgcgacgattaagccgcctgcaattcgcagaccgggaatgctaatgccaaatgtatccatcaccagttgcccggcgtaatacgccaccatcatgatggcaaatacgtacacgctggccatcaagctctgacgattacgttcggcactgttcatgttgcctgccaggccaagaaataacgcgacagttgttaatgggttagctaacggcagcaacaccaccagccccaggccaattgctttaaacaaatctaacattggtggttgttatcctgtgtatctgggttatcagcgaaaagtataaggggtaaacaaggataaagtgtcactctttagctagccttgcatcgcattgaacaaaacttgaaccgatttagcaaaacgtggcatcggtcaattcattcatttgacttatacttgcctgggcaatattatcccctgcaactaattacttgccagggcaactaatgtgaaaagtaccagcgatctgttcaatgaaattattccattgggtcgcttaatccatatggttaatcagaagaaagatcgcctgcttaacgagtatctgtctccgctggatattaccgcggcacagtttaaggtgctctgctctatccgctgcgcggcgtgtattactccggttgaactgaaaaaggtattgagcgtcgacctgggagcactgacccgtatgctggatcgcctggtctgtaaaggctgggtggaaaggttgccgaacccgaatgacaagcgcggcgtactggtaaaacttaccaccggcggcgcggcaatatgtgaacaatgccatcaattagttggccaggacctgcaccaagaattaacaaaaaacctgacggcggacgaagtggcaacacttgagtatttgcttaagaaagtcctgccgtaaacaaaaaagaggtatgacgatgtccagacgcaatactgacgctattaccattcatagcattttggactggatcgaggacaacctggaaagcccactgagtctggagaaagtgagtgagcgtagcggttactccaaatggcacctgcaacggatgtttaaaaaagaaaccggtcatagtttaggccaatacatccgcagccgtaagatgacggaaatcgcgcaaaagctgaaggaaagtaacgagccgatactctatctggcagaacgatatggcttcgagagccaacaaactctgacccgaaccttcaaaaattactttgatgttccgccgcataaataccggatgaccaatatgcagggcgaaagccgctttttacatccattaaatcattacaacagctaattgaaaacgtgacaacgtcactgaggcaatcatgaaaccacttagttccgcaatagcagctgcgcttattctcttttccgcgcagggcgttgcggaacaaaccacgcagccagttgttacttcttgtgccaatgtcgtggttgttcccccaagccaggaacacccaccgtttgatttaaatcacatgggtactggcagtgataagagcgatgcgctcggcgtgccctattataatcaacacgctatgtaatttgttctggccccgacatctcggggcttattaacttcccacctttaccgctttacgccaccgcaagccaaatacattgatatacagcccggtcataatgagcaccgcacctaaaaattgcagacccgttaagcgttcatccaacaatagtgccgcacttgccagtcctactacgggcaccagtaagcttaacggtgcaacccgccaggtttcatagcgtcccagtaacgtcccccagatcccataaccaacaattgtcgccacaaacgccagatacatcagagacaagatggtggtcatatcgatagtaaccagactgtgaatcatggttgcggaaccatcgagaatcaggctggcaacaaagaagggaatgattgggattaaagcgctccagattaccaggctcatcaccgccggacgcgtactgtggctcatgatctttttattgaagatgttgccacacgcccaactaaatgctgccgccagggtcaacataaagccgagcatcgccacatgctgaccgttcagactatcttcgattaacaccagtacgccaaaaatcgctaaggcgatccccgccaattgtttgccatgcagtcgctccccgaaagtaaacgcgccaagcatgatagtaaaaaacgcctgtgcctgtaacaccaggctagccagtccagcaggcataccgaagttaatggcacaaaaaagaaaagcaaactgcgcaaaactgatggttaatccataccccagcagcaaattcagtggtactttcggtcgtgcgacaaaaaagatagccggaaaagcgaccagcataaagcgcaaaccggccagcatcagcggtggcatgttatgaagccccactttgatgaccacaaaatttagcccccatacgaccactaccagtagcgccaacaccccatcttttcggctcattctaccgcctctgaatttcatcttttgtaagcaatcaacttagctgaatttacttttctttaacagttgattcgttagtcgccggttacgacggcattaatgcgcaaataagtcgctatacttcggatttttgccatgctatttctttacatctctaaaacaaaacataacgaaacgcactgccggacagacaaatgaacttatccctacgacgctctaccagcgcccttcttgccagcagcttgttattaaccatcggacgcggcgctacgctgccatttatgaccatttacttgagtcgccagtacagcctgagtgtcgatctaatcggttatgcgatgacaattgcgctcactattggcgtcgtttttagcctcggttttggtatcctggcggataagttcgacaagaaacgctatatgttactggcaattaccgccttcgccagcggttttattgccattactttagtgaataacgtgacgctggttgtgctcttttttgccctcattaactgcgcctattctgtttttgctaccgtgctgaaagcctggtttgccgacaatcttagctccaccagcaaaacgaaaatcttcagtatcaactacaccatgctaaacattggctggaccatcggtccgccgctcggcacgctgttggtaatgcagagcatcaatctgcccttctggctggcagctatctgttccgcgtttcccatgcttttcattcaaatttgggtaaagcgcagcgagaaaatcatcgccacggaaacaggcagtgtctggagcccgaaagttttattacaagataaagcactgttgtggtttacctgctctggttttctggcttcttttgtaagcggcgcatttgctagttgcattagtcaatatgtgatggtgattgctgatggggattttgccgaaaaggtggtcgcggttgttcttccggtgaatgctgccatggtggttacgttgcaatattccgtgggccgccgacttaacccggctaacatccgcgcgctgatgacagcaggcaccctctgtttcgtcatcggtctggtcggttttattttttccggcaacagcctgctattgtggggtatgagtgctgcggtatttactgtcggtgaaatcatttatgcgccgggcgagtatatgttgattgaccatattgcgccgccagaaatgaaagccagctatttttccgcccagtctttaggctggcttggtgccgcgattaacccattagtgagtggcgtagtgctaaccagcctgccgccttccagcctgtttgtcatcttagcgttggtgatcattgctgcgtgggtgctgatgttaaaagggattcgagcaagaccgtgggggcagcccgcgctttgttgatttaagtcgaacacaataaagatttaattcagccttcgtttaggttacctctgctaatatctttctcattgagatgaaaattaaggtaagcgaggaaacacaccacaccataaacggaggcaaataatgctgggtaatatgaatgtttttatggccgtactgggaataattttattttctggttttctggccgcgtatttcagccacaaatgggatgactaatgaacggagataatccctcacctaaccggccccttgttacagttgtgtacaaggggcctgatttttatgacggcgaaaaaaaaccgccagtaaaccggcggtgaatgcttgcatggatagatttgtgttttgcttttacgctaacaggcattttcctgcactgataacgaatcgttgacacagtagcatcagttttctcaatgaatgttaaacggagcttaaactcggttaatcacattttgttcgtcaataaacatgcagcgatttcttccggtttgcttaccctcatacattgcccggtccgctcttccaatgaccacatccagaggctcttcaggaaatgcgcgactcacacctgctgtcacggtaatgttgatatgcccttcagaatgtgtgatggcatggttatcgactaactggcaaattctgacacctgcacgacatgcttcttcatcattagccgctttgacaataatgataaattcttcgcccccgtagcgataaaccgtttcgtaatcacgcgtccaactggctaagtaagttgccagggtgcgtaatactacatcgccgattaaatgcccgtaggtatcattaaccaatttaaatcggtcaatatccaacaacattaaataaagattcagaggctcagcgttgcgtaactgatgatcaaaggattcatcaagaacccgacgacccggcaatcccgtcaaaacatccatattgctacggatcgtcagcaaataaattttgtaatcggttaatgccgcagtaaaagaaagcaacccctcctgaaaggcgtcgaaatgcgcgtcctgccagtgattttcaacaatagccagcattaattcccgaccacagttatgcatatgttgatgggcagaatccattagccgaacgtaaggtaattcatcgttatcgagtggccccagatgatcaatccaccgaccaaactggcacagtccataagaatggttatccgttatttctggcttactggcatctctcgcgaccacgctgtgaaacatactcaccagccactggtagtgggcatcgatagccttattgagatttaacaagatggcatcaatttccgttgtcttcttgatcattgccactcctttttcacagttccttgtgcgcgctattctaacgagagaaaagcaaaattacgtcaatattttcatagaaatccgaagttatgagtcatctctgagataacattgtgatttaaaacaaaatcagcggataaaaaagtgtttaattctgtaaattacctctgcattatcgtaaataaaaggatgacaaatagcataacccaataccctaatggcccagtagttcaggccatcaggctaatttatttttatttctgcaaatgagtgacccgaacgacggccggcgcgcttttcttatccagactgccactaatgttgatcatctggtccggctgaacttctcgtccatcaaagacggccgcaggaataacgacattaatttcaccgctcttatcgcgaaaaacgtaacggtcctctcctttgtgagaaatcaaattaccgcgtagactaacgctagcgccatcgtgcatggtttttgcgaaatcaacggtcattttttttgcatcatcggttccgcgatagccatcttctattgcatgaggcggcggtggcgctgcatcctgttttaaaccgccctggtcatctgccaacgcataaggcatgacaagaaaacttgctaatacaatggcctgaaatttcatactaactccttaattgcgtttggtttgacttattaagtctggttgctatttttataattgccaaataagaatattgccaattgttataaggcatttaaaatcagccaactagctgtcaaatatacagagaatttaactcactaaagttaagaagattgaaaagtcttaaacatattttcagaataatcggatttatatgtttgaaaattattatattggacgagcatacagaaaaagcaaatcacctttacatataaaagcgtggacaaaaaacagtgaacattaatagagataaaattgtacaacttgtagataccgatactattgaaaacctgacatccgcgttgagtcaaagacttatcgcggatcaattacgcttaactaccgccgaaagttgcaccggcggtaagttggctagcgccctgtgtgcagctgaagatacacccaaattttacggtgcaggctttgttactttcaccgatcaggcaaagatgaaaatcctcagcgtaagccagcaatctcttgaacgatattctgcggtgagtgagaaagtggcagcagaaatggcaaccggtgccatagagcgtgcggatgctgatgtcagtattgccattaccggctacggcggaccggagggcggtgaagatggtacgccagcgggtaccgtctggtttgcgtggcatattaaaggccagaactacactgcggttatgcattttgctggcgactgcgaaacggtattagctttagcggtgaggtttgccctcgcccagctgctgcaattactgctataaccaggctggcctggcgatatctcaggccagccattggtggtgtttatatgttcaagccacgatgttgcagcatcggcataatcttaggtgccttaccgcgccattgtcgatacaggcgttccagatcttcgctgttacctctggaaaggatcgcctcgcgaaaacgcagcccattttcacgcgttaatccgccctgctcaacaaaccactgataaccatcatcggccaacatttgcgtccacagataagcgtaataacctgcagcatatccgccaccaaaaatatgggcgaaataactgctgcgatagcgtggcggtatagcaggaagatccatattttccgccaccagcgcccgcaattcaaaatcatcgacatcctgcattgcttcgttttcttccaggcaatgccagcgcatatcgagaagtgcggcgctaagcagttcgctcatctcataccctttgttgaacaggctggcattacgcattttctgttgcagttcgtcaggcattgctgccccgctctgataatgccgggcgtagcgagcgaatacctgcggatgcgttgcccagtgttcgttgatttggctcggaaattcgacaaaatcacgcggcgtgttggtgccggaaagcgtggcataacgctggcgggcaaaaaggccgtgcagcgtatgaccaaattcatggaataaggttatgacatcatcccagagtaacaacgcaggctcaccggcagcgggtttctgataattgcagacgttataaattaccggatgtgttttattaagcgtactttgctcaacaaaattgcccatccatgcaccgccgcttttactatcacgggcgaagaaatcaccgtaaaataacgccagccccacgccattatgatcaaaaatttcccacacacgaacgtcaggatggtagacaggaatatcaaaacgttcgacaaacttaataccgaagagctgattcgcggtccagaatacaccttcatttaacaccgtgtttaattcaaaatatggcttgagctgcgcctcatcaagatcaaatttctcccgccgtacctgttccgcataaaatgcccagtcccacggctgcgcgctaaacccgccctgctgcttatcgataaccgcctgtatggaggctaattcatcgctcgcacgttgacgcgccgctggaacaatttcccgcataaagttaagtgctgcttcaggtgtttttgccatctgatcggcgattttccatgcggcataatgaggaaaaccaagtagtgttgcctgttgtgcacggatctccaccagacgttgaatgatagcgcgggtatcattggcatcatttttttccgctcgcgtccagcccgcaataaacagtttttcacgcgtcgcacgatcgcgcatttcggcaagcgccggttgttgggtggtattcagcagcggaatcagccatttgttatccagacctttctcgcgagccgcctctgccgccagcgcaatctcttgctcactcattcctgccagctgcgcgatatcgttcacaaccagaccgccggatttatttgctgccagtaatcgctggttaaactggctggtcagggtcgcagcttctgtattcagtacttttaattttgctttatcagcttgcgcaagtttggctccggcaaggacaaaacgttgatgaatcacctccaccaggcggatggattcactatcaagccccagggattcacggcgctgccagacagcatctacccgcgcgaataattcaccgttcagatagatatcattagccagttccgccagttcagcggaaaactgctcgtcaagacgctgtaattcatcattggtatgcgccgcagtcatcgcaaaaaagacgctggtaacgcgggtaagtaattctccgctttgttccagtgccagaatagtattgttgaaatcaggcatttgcgggttaagcgcgatggcagcaatttctgcccgcttttgctgcattccctcatcgaatgccgggcgatagtgatgattggcaatttgatcaaaatggggagccagatacggcagtgtgctttgcacaaggaaaggattcattgttgtcattttcttctcctgaacgcgaggtgttccatagcgtaggcttactgataacggagtgcaatcttgcaatccagtattacccgctcttaagcatcccgtgctatgttattgacacacaaaagcgttgaggaacagtgagaagcgcagtgcccagccatcccgatactgctgctttcaccaaatccttagtgcttctttcgtgtttttctattgtcataatggttatctctaaaaaagaggtaagatgcgtactacttactcgccgttattggtattattcagaaaaagtgagtaagactttgcagcaatgtttttgatcctgttcaaataaactaatggcatcagcaacatgctggaaatcaaacgtatgggtaattaatttttctggtttaattaaccctttacttaaccagtcgataacgatcgggaatttatttgcatttaagcgactagagaaaatagagagttcttttccggtaattccttgctgaatcacttcagacggttcactggagaaccccatcaatacaatacgtgccgctggagaagccagcgttacggcctctttcaggatagaaggatgacaagccgcatcgataattaatgtcggcttgatgcctttttcagtgaaaatctcgccaagcggtgtctggctgttattaatcgcccagtcagccccgctctctttcgctttttccagtcgttcatcaatgcgatcggcaacaatcacatttttaacgttatagacgccttttaatacctgaacgatcgtcaggccgattggaccggcaccataaaccagaacggtatcattttcagtcggttgaccatgtccggttacgttagccgcaatggtaaaaggttcgatcattaccgcatattgatcggccactgcttcaggaattttccacgcattttttgccggaaccacggcatattcactgaaaccaccgtcagcgtgcacacctaatacagccagtgtcgtacaaacgttcggtttacctatagagcacggatagcaatgcccacagctgaccaccggatcgacagcaacacgttcaccgactctggcgctttccacgccttcacccactgcatcaatgacgccaaagaattcatgaccaatgacgcgcggatatttcgcaaaaggattatgcccacgataaatatggctatcactaccacaaattccggcaagtttcacttttactcgtacttcacccgcactcggggtgggtatttcacgttcgacaatcgccagttgattcggtttttcaattaatatgcttttcattatcttactccttaccagttccacagcgtgccatcttccagacgtgcgactggtagataagcaggttcatagggatatttcgccgccagcttttcatcgaattcgataccaagacccggtttgtctcccggatgcatatagccgttatcgaaagtccagttgtgcgggaagacttcgagcatttgttcggaataacccatgtattcctggacaccgaaattggggacccacagatcaaagtgcagcgccgcagccatgcagactggactcaaatcggaaggaccgtgactgccagtacgtacctgatacaggctagcaaaatcggcaatccggcgcataccggtaattccgcctgcatgggtcagcgtggtgcggatataatcgatgagttgctcttcaatcagttgtttgcagtcccagatgctgttgaagacttcacccactgcgatgggtgtgacggtatgttggcgaatgagacggaagcattcctggttttccgcaggcgtcgggtcttccatccagaacatgcgataatcttcaatgcttttaccaaagcgcgccgcttcaataggcgttaagcgatggtgcatgtcatgcagcaaatgttcattaaaaccaaacttgttacgtaccgcgtcaaacaatttcggcatgaaatcgaggtatttctccgtgctccacagctgctcttccggccactgtcctttggttgcgggttcataagccagacctttacctttgctcatgccgtaggtggttttcataccagggattccgcactgcacgcggatggctttgaatccaagctcttgatgacgggcataatcatccagagcttcatcaatactgtgaccggtggtatggcaataaaccatcaccccttcacgagacgcgccgccgagtaactggtaaagcggcatgttggcagctttggctttaatatcccacagcgccatatcaaccgcactaatggcgctcatcgtaaccggaccgcgacgccagtaagcacctttatagaaaaactgccagatatcttcgatacggtgcgcatcgcgaccaataagctgcggacaaaggtgatcctgcaaataagaggccacggaaagctcacgtccattgagggtggcatccccaaggcccgtaataccgtcctcagtggtgatttttaatgtgacgaaattacgccccggacaggtaacaaaaacttcagcctttacgatcttcatgttcgattccttgcatcgcttgtcgtgatgcatgaaatctacgcaactgagctactaccatacaagtataaagatcgaaaaaagccggagtgatcacaaaaaaaggcgtatatttgcgctgtgaatggttgacaaaagatgaaatagaataccttttgtcagctgacacttcctcttatcttattgataaaatggatttatgttcttacgtgcgcccccagcccgcaacaatgatcaacatgccgcaaagcgcaatcaacgcacccgtccagtcataaagagtcagtttcacgccatccacaacgcgcagccacatcaacgccgtgcagacataaacgccaccataagccgcgtaaacacgcccactcgccgctggatgcaacgttaacaaccagacaaacagcgccagactaatccccgccggaagcaacagccagatactggcgtttcgttttaaccacaaccagggcagaaagcatccaataatttcacacagcgcagtagcaaaaaatagtaacgttgttttaatcatctttgtctcttattgacatcatgtatagttatagggcgacataatatcatcaatataaacaccctcctggtacgttttgcgtccgcagtggatggtgtagaatcacctttaatcattcatacagggaatgaattatgaaaatcactctcagcaaacgaatcggcctgctcgctattctgctgccttgcgcactggcattgagcacaactgttcatgccgaaactaacaaactggtgattgagtctggcgacagtgcacaaagccgccagcacgccgctatggaaaaagagcaatggaatgacacgcgcaatctgcgccagaaagtgaataaacgcactgaaaaagagtgggataaagccgacgccgcttttgataaccgcgataaatgtgagcaaagcgccaacatcaatgcctactgggagcccaatactttgcgctgcctggaccgtcgaactggccgcgttattaccccctaacctgttattgatttaaggaatgtaaggacacgttatgccaagcgcccacagtgttaagctacgcccgctggagcgtgaagatttacgctatgtacatcaactcgacaataacgccagtgtgatgcgttactggtttgaggaaccctacgaagcctttgttgaactctctgatctgtatgataagcatattcacgatcagagcgaacggcgctttgtggtggaatgtgacggcgaaaaagccggtctggtggagctggtggaaattaaccatgttcatcgccgcgcagaatttcagataattatctccccggagtatcaggggaaaggtctggcaacccgtgccgccaaattagcaatggactatggctttaccgttctcaatctctataagctgtatctgatcgttgataaagagaatgaaaaagcgattcacatttaccgcaagcttggctttagcgttgaaggtgaattgatgcacgagttctttattaatggtcaatatcgtaatgccattcgcatgtgtatattccagcatcagtatctggcagagcacaaaacaccgggtcagactctcctgaagccgaccgcacaataacattaataataatcgatcgtatttttgatggtgtaaacccgttcgacggcgggttttactccttcatcaacaatgattagctgacagtccaccggattagcgtgactgtcatattcacagctctgttttacattaccaacccgttgattattcagtaaagtaaccgctgtgtaatctaattttttgatcggatccgtacttggcgtggcgctgacagataatgttttgtcgttacttttcgtggttttacccagcggataaccctgatcatcatagcgatattccatctgcatttgtttgctgctggctttaatcacgaagccattatcatcggtttcccaactcaccccggcagaaggtaattctgctagctggcattttccctgtaaacgtactctcttctccagcgtctcggcatcacggtaataattggcgtccagtaccagagcgaccacggtattattttccagatccagtaattcgagactatcaaaacagccttcttcgctcaaagtcccagaaacacgtttcgtcacttcaccttgctcatccattaatgtctgagtgaaatcttttaccggaccacgcagcggatcaaaatcgaattcattagagaaactggccatctcaggggtaaaactaagtgttacctctgtgcggtcacatcctgtgaggaatatcgcgagtaagcatggtagtaatttgtatttcacaacagtcaccagagagtagagatgattctcaatcatagtagcaaatacagtactttacacgttaaatgctatgcttaaagaagttatcttcgcgtaaggagcttatgatgaaactcagtacctgctgtgccgcgcttctgctcgccctcgccagtcccgcggtactcgccgcgccgggatcctgtgagcgcatacagagcgatataagtcagcgcattatcaataatggcgtacccgaaagcagcttcacgttaagtattgtacccaatgaccaggttgatcagcctgattcccaggtcgtcggccattgcgctaatgatacgcataaaattctctatacccgcaccaccagcggtaacgtctctgctcccgcgcagtctagccaggatggcgcgcctgccgaaccgcagtaacacattatcgactgaacgccggatatgacaaatccggcgatttgaacatacaacataatcccaccttattactcatacccttctattgatatggattaataattcttaacccaaaatgggtagactccctctattgttagcgcgctaaatattcaatatataaacttttatataacgataaagaacagggagtgagttatgtccaaaaatgaacgaatggtgggcatcagccgcagaacactcgttaaatctaccgcgataggttctctggcgctggctgcaggcggtttttctttgccgtttaccctgcgcaatgcagcagcagcggtacaacaggcccgcgaaaaagtggtctggggtgcctgttccgtcaactgtggtagccgctgtgcacttcgtctacatgttaaagataatgaagtgacctgggtggaaactgacaataccggcagcgatgagtacggcaaccatcaggtacgcgcctgtttgcgcggtcgctccatccgccggcgtattaatcatcccgatcgcttgaattacccaatgaaacgcgtgggcaaacgcggcgaaggcaaattcgaacggattagctgggatgaagccctggatactatcgccagtagcctgaagaaaaccgtcgaacaatatggcaatgaggctgtatatattcagtactctagcgggatcgttggcggcaatatgacccgctctagcccaagtgccagcgcggtcaaacgcctgatgaactgctacggcggtagtctcaaccagtatggctcctacagcactgcgcaaatttcctgtgccatgccctacacctacggcagtaatgatggcaacagcaccacggatattgaaaacagcaagctggtcgtgatgtttggtaacaacccggcagaaacccgcatgagcggtggtggcatcacttatcttcttgaaaaagcgcgcgagaaaagcaacgccaaaatgattgttatcgatccgcgatataccgatacggctgccggtcgtgaagacgaatggctccctattcgcccgggcaccgatgccgcgctggttgcgggtattgcctgggtattgattaacgaaaatctcgttgatcaaccttttctcgataaatactgcgtcggctatgacgaaaaaaccttacccgcagatgcacccaaaaatggtcactataaagcctatattcttggtgaaggtgacgataaaacagcgaaaacgccgcagtgggctagccaaattaccggtatcccggaggaccgtatcatcaaactggcgcgtgaaattggcacagcaaaacccgcttatatctgccagggctgggggccacaacgccaggcaaacggcgaactgactgcacgcgctattgctatgttacctattttgacgggcaatgtcggcatcagcggcggaaatagtggcgcgcgtgaaagcacctataccattaccatagaacgcctgccggtgctggataatccggtcaaaacgagtatctcctgcttcagctggacagatgctatcgatcatggtccgcaaatgacggcaatccgcgacggcgtccgcggcaaagataaactggatgtgcccattaagttcatctggaactacgcgggaaataccctcgttaatcagcattctgacatcaacaaaacgcatgaaattctgcaggacgaaagcaaatgcgaaatgattgtggtcatcgaaaactttatgaccagtagcgcaaaatatgccgacattctgctgccagacctgatgaccgttgagcaggaagatattattcctaacgactacgccggtaacatgggatatctcattttcctccagcctgtcaccagcgaaaaattcgaacgcaaaccgatttactggatcctgagtgaagtcgcgaaacgtcttggacctgacgtctatcaaaagttcacagaaggtcgcacgcaggaacaatggttacaacatctgtacgccaaaatgcttgccaaagatccggcgttaccgtcttacgacgaactgaaaaaaatgggtatctataagcgtaaagatcccaatggccattttgtcgcctacaaagcatttcgtgacgaccccgaggcaaatccacttaaaacgccttccggtaagattgaaatttattccagcaggctggcggaaattgcccgtacctgggaactggaaaaagatgaagtgataagcccattgccagtttatgccagtacctttgaaggctggaactcccctgaacgtagaaccttcccactgcaactgtttggtttccattacaaatcccgtactcacagcacctacggcaatattgatctcctgaaggctgcctgccgtcaggaggtgtggatcaaccctatagatgcgcagaaacgtgggattgccaacggcgatatggtgcgggtgtttaaccatcgtggcgaagttcggctaccagccaaagtaacaccacgtattctccctggagttagcgctatgggccagggagcctggcacgaggccaatatgtctggcgataaaatcgaccatggcggctgtgtgaatacgctaaccactctgcgccctagtccactggcgaagggaaacccgcagcacactaatctggtcgagatcgaaaaaatataacccacgacaaccataaattctggcatgacattttgtttgaaaagcaataagtgagtaatgatgaaaatccataccacagaggcgctcatgaaggctgaaatcagccgtagaagtctgatgaaaacctccgcacttggcagtcttgcgctggcaagcagtgctttcactctgccattttcccaaatggtccgggcggcagaggctccggtagaagagaaagcggtctggagttcctgcaccgttaactgcgggagccgctgtctgttacgtttgcatgtgaaagatgacaccgtgtactgggtggagtctgatacgacaggtgacgacgtctacggtaatcatcaggttcgagcgtgtttacgcgggcgctctatccgccgacggatgaatcatcctgataggttgaaatatcccatgaagcgcgtcggcaagcgcggtgaaggtaaatttgaacggataagttgggacgaagccctggataccatcagtgataatcttcggcggatcctgaaagattacggcaatgaggctgtacatgtcctgtacggaacaggcgtagatggcggaaacatcaccaacagtaacgtcccgtaccgtctgatgaactcttgcggtggttttctcagtcgctatggcagctacagtaccgcacagatcagtgccgcaatgagttatatgttcggtgccaatgatggcaacagcccggatgatatcgccaatacgaaactggtcgttatgttcggaaataacccggcagaaacgcggatgagcggcggtggtgtcacttactacgtcgagcaagcccgcgaacgtagtaacgcacgcatgatcgtcatcgatccacgttataacgacactgctgccgggcgtgaagatgaatggctgcccattcgccctggcaccgatggcgcactggcctgtgcgattgcctgggtactgattactgaaaacatggtcgatcagccatttctcgacaaatattgtgttggttacgatgaaaaaacgctgcccgccaacgcaccacgtaacgcgcattataaagcctatattctgggcgaagggcctgacggcatagctaaaacgccggaatgggcagcaaaaatcaccagcatcccggcagaaaaaattatccagttggcacgagagatcggtagtgcaaaacctgcttatatttgtcagggttgggggccacaacgacattccaacggcgagcaaacatcccgcgctattgccatgctttccgttctcaccggcaacgtcggcataaacggcggcaacagtggcgtacgcgaaggtagctgggatctgggggtagaatggttcccgatgctcgagaatcctgttaaaacgcagatttccgtctttacatggacagatgccatcgaccatggtacggaaatgaccgcgacccgtgatggtgttcgtggaaaagaaaaactggatgtccccatcaagtttttatggtgctacgccagtaacacattgatcaatcaacatggcgacatcaatcacacccatgaggtgcttcaggatgacagcaagtgcgagatgattgttggcattgaccacttcatgacggccagcgctaagtattgcgatatcctgttgcccgacctgatgccaacagagcaagaagaccttatctctcatgaatctgcagggaatatgggctatgtgatcctcgcccaacccgcaaccagtgcaaaatttgaacgcaaacccatctactggatgctgagtgaagtcgccaaacgcttaggaccagacgtttatcaaacctttactgaaggtcgcagtcagcatgaatggatcaaatatctccatgcgaaaacgaaggaacgtaaccctgagatgcccgactacgaggagatgaaaacgaccgggatctttaagaaaaaatgcccggaagaacactacgtcgctttccgcgcattccgtgaagatccacaggcaaacccgttgaaaacacctagcgggaaaatcgaaatttattctgaacgactggcgaagattgcagatacctgggaattgaaaaaagatgaaattattcatccccttcctgcgtataccccaggttttgatggctgggacgatcccctgcggaaaacctatccactgcagttaacgggcttccattacaaagcgcgtacccactccagctacggcaatattgatgtgttacagcaggcctgcccacaagaggtgtggatcaaccccattgatgctcaggcacgcggtatccgtcatggcgataccgtgcgggtatttaacaataatggagaaatgctgattgccgcaaaagtgactccgcgtattctgcctggcgttaccgccatcgggcaaggtgcgtggcttaaagcggatatgtttggtgaccgggtcgatcacggcggcagtatcaatattctgacctctcaccgccctagtccgctggcaaagggaaacccgagccacagcaatcttgtccagatcgaaaaggtttaaggagtagcccatgaccacacaatatggattttttatcgattccagccgctgtactggctgtaaaacctgcgaactggcgtgcaaagattttaaagatcttggcccggaagtcagtttccgccgtatttatgaatacgctggcggcgactggcaggaagataatggcgtctggcaccagaacgtgttcgcttattatctctccatctcctgtaaccattgcgatgaccccgcatgtacaaaagtctgccccagcggcgcaatgcataagcgtgaagatggctttgtggtggttgatgaagatgtttgtatcggctgccgctactgccacatggcttgtccgtacggcgcgccacagtacaatgctgaaaaagggcacatgacgaagtgcgatggttgttatagccgcgtcgccgaggggaaacaacccatatgtgtcgaatcctgcccgctgcgtgcacttgagttcggtccaattgaagagctgcgccagaagcacggcactcttgctgccgtcgcgccactgccgcgcgcgcatttcacaaaacccaatatcgttatcaaacctaacgccaacagccgcccgaccggcgataccactggttatctggctaatccggaggaagtgtaaaatgggaaatggatggcatgagtggccactggttatctttaccgtattgggtcaatgcgtagtaggcgcgctgattgttagcggaattggctggttcgccgccaaaaatgacgcagaccgtcagcgtattgtccgtggcatgtttttcctctggctgttgatgggcgtcgggtttattgcctctgtcatgcacctgggaagcccactgcgggcgtttaactccctgaatcgaatcggagcttctggtctgagtaacgagattgctgccggttccatattttttgccgttggcggattatggtggctggtggcagtcatcggtaaaatgccgcaagcgttggggaaactctggttacttttcagcatggcgctcggcgtcattttcgtctggatgatgacctgcgtgtatcaaatcgacaccgtgccaacctggcataacggttacactacgctggctttcttcctgacggtattgttgagcggtccaatacttgctgccgcaattctgcgggcagctcgcgttacatttaataccacaccatttgccatcattagcgttctggcgctgatcgcttgtgccggggtgattgtgctgcaaggtttgtctctggcgtctattcacagttccgtgcaacaagccagcgcactggtaccagattacgcctccttacaggtctggcgtgtggtattgttatgcgcaggtcttggatgctggctttgcccgctcattcgtcgccgtgaacctcacgttgccggacttattctggggctaatcctcatacttggcggtgagatgatcgggcgtgtgctcttttatggcctgcacatgacagtaggaatggctattgcaggttaacaaattggtgcggggcaacccgcacatttcaggatgttaggaatgacccattttagtcagcaagataatttttctgtcgcggcgcgcgtgttgggcgcgctgttttattacgctccagagagtgcggaagccgcacctctggttgcggtactcaccagtgacggctgggaaactcagtggcctctaccagaagcgagtttagcgccgctggtgacggcttttcagacacagtgtgaagagactcacgcccaggcctggcagcgtttgtttgtcggcccgtgggcactgccgtctccgccgtgggggagcgtctggctggatcgcgaatctgtgctgtttggcgatagtacattggcacttcgtcagtggatgcgcgagaaaggcattcagtttgaaatgaagcaaaacgaaccggaagatcattttggtagtctgctgttgatggctgcgtggttggcggagaatggtcgccagacagaatgcgaagaattgctggcatggcacctttttccgtggagtacacgttttcttgatgtttttatcgaaaaagcagaacaccctttctaccgtgcactgggtgaactggctcgcttaacgctggcgcaatggcaaagtcaactgttaattcctgtcgcggttaaaccgctgtttcgataagatcaccgtaatattgccggatggtgacgattacgcgcaatccggcaataataggttacagtgtcacgtttttttatctcttaaagcacgcactgcttttgcggctggcctcttttgccgcaaaatagtcgcccgtgtttcattgcccatttctgctcatgcatcatctacacatctatccggatctgcgcactatgttccaccgtctgcttatcgcaacagtcgtcggtattctcgcggcctttgccgttgccgggtttcgtcatgcgatgctgctactggagtggttgttcctcaataatgactccggcagtctggtcaatgcagcgacaaacctttccccctggcgacggttgctaactccggcgctcggcggactggcggcgggtttgttgctgatgggctggcagaaatttacccaacaacgccctcatgcgccgaccgattatatggaagcgttgcaaaccgatggacagttcgattacgcagcaagcctggttaaaagccttgcctctctgctggtagtaaccagcggcagtgcaattggtcgcgaaggtgcgatgattcttttagctgcccttgccgcctcctgttttgcccaacgttttacgccacgccaggagtggaaattatggatcgcctgtggggccgcggcgggaatggctgcggcctatcgtgccccgcttgctggcagtttatttatagccgaagtgctgtttggcactatgatgttggcctctctcggcccggtgattatttccgccgtcgtggcattgctggttagcaatctgattaatcatagcgacgcgttactctacaacgtacaactcagtgtgacggttcaggctcgtgactatgcgctgattatcagtacaggtgtgctggcaggtctgtgcggaccactgttgttaacgttaatgaacgcctgtcatcgtggatttgtgagtctcaaacttgcgccgccctggcaactggcactaggcgggttgatcgtgggtctgctttccctgttcacacctgcagtgtggggcaacggctatagcaccgtacaatcctttttaaccgccccaccactgttaatgatcattgccgggatcttcctttgtaaactgtgtgccgtgctggcgagtagcggttccggcgcacccggtggggtctttacaccgacgctatttatcggtcttgccattggcatgttgtatggtcgtagcctgggattatggttccctgatggcgaagaaattacacttttactcggattgaccgggatggcgacactgttggcggcgaccacgcacgcgccgattatgagcacgttgatgatatgtgaaatgaccggggagtatcagctactccccggtttattgattgcctgcgtaattgcgagcgtaattagccggacgttacaccgtgactctatctaccgccagcacactgcgcagcatagctaagcggatgtattgccccagttcacgctgttcggcgcgcggcagataaggcagttcaccaatgagcggtgccggaagttttttacccagcacatcaatgatttccgcataatgcgccagtcctgggttgattcggttagccacccagccaatgagcggcagcccgtcgttggcgatcgcctgagctgttagcagtgcatggttaatgcaaccttcctgaataccgacaaccatcaacaccggcagttgttcctgcactacccattcagagagtggacgcaaatcattcatcagactgcgccagccgccagtcccttctaccacgacatgatcgactttttcggtcaggtttgccaggccgttactaatgagggtgtaattgattgggcaactgtgcgccacgctactttcttcttcgcttaacgcgataggattaactgcttcataaggcagttcgatggtactaacactctgcaacaccagggcatctttattacgcagcccttcgggtgtctctttgctccccttcgctacgggtttatatcccgcaaccgtttttccctgggaggctaacgcttgtagcaatgcgcgggaaaccaccgttttccctacagaagtgtctgtaccggtaataaagaaacgcttcagcatcactaactccaccgttatgcttcacaaatataaaccaggaaaataattaaccttgaaagtctaagttatgctttcctggcccaaattgagatagcgcaaattttggtagaacagttaaaaaatgttaaccctgcaacagacgaatcaacaaagaaccgttatacatcgcgtcttttaccagtgcagcgcctgccatcgtgccctggttagaaaactgagtactctcaacgctgatgtgctgactatacgcaggaagggcctgctgacggatgctgtcactgatgaccgggaagaggatatctgccgctttacttaacggactgccaatcagtattttttgtgggttaaataaattcaccatgatggcaagaatgcgcccgacatgcgcgcccaccccggtaatgatgtcttttgccagtagatcgccgcgcaatgccgcctgacacaaactgtccacggttaacggttgtccatgtaacatgctgctcatggattgattaagacgcagctgtgccagctcaagaatactgtccacgctggcgatggtttcgaggcagccgtgattcccgcaataacagcgtttcccatacgggtcgacctgtgtgtggcctatttccacgagactactgctgcctgcgtgtagcagatgaccatcggtaatgacgcccgcccccacgttgtgatcgataaccacctgaatcacatcgcgcgccccgcgactggcaccaaacaaggcctctgccatcgtccatgcgctgatatcatgctgaatataaaccggaacgccggtatgctgctccagcgcctcgccgagcggcatctcttttacatcctcgtagaacggcatgcgatgtacaataccattttccgtatcaataattcccggcaaggttatggcaatgctagttagacgctcaagttttttctggtggcggataaaaaactgatcgatatgggaaataatacgatccagcaatggcaagtcatcttttaacgccagttcctggctctcttccaccaccagtttgctgctcagatcgcgcagagcaaggaaaatctccccgcgactaatgcgcagagaaagatagtgccaggcttcagtttcaaccaccagccccaccgccggacggccacggttccccgcttctttgatttccagctcttgcaccaggtgtgcttcgagcatctcacggacaattttagtgatactggcaggagccagttgcgccagacgggaaagatcgatacggctgactggaccaagctgatcaatcaggcgataaaccgcgcccgcgttggtctgctttatttgatcaatgtgcccaggctggttttcagcaaccaccgcatactccctatattttcgcgctccgaaataatctgtaggctatggtgaagcacttcaatacgtgtcgtcaaatttttacttaggcatgtgattaacagcacatttttcgggctttttcgctgaaatttccctcacctgagagcattcagcagatgaatacgaaagttacgcgcagccggactttgttcatgatgtttcggccagaccaaccacatttcagaaaccgcatcctcttcagcaatcggcacccagcgcatttcgttgagctgaacacgtttaaaactcgcaggcaaaatactaacacccagaccggcggaaaccagaccgatgatggtcattgcctcgcccacctcctgagtgatgacgggcgtcaaatggtaacgtcgcatcagcccgagaatatcgtcatacagccctgtcccgacgtgcggatcaaaaaagacaaagggttctttcgccagttcagccagcgttacattcgggttatttgccaggggatgatcgtgcgggatcatcgccataagcggttcatggacgatgactgcgtgttcaaggctctccggtaacgctgtgttacgcagcaatcccatatccagcgttccttcaatgagcggagcgatttgctcgcgagtgttcatttcgcgggtttgtaaatggacatcaggataatcacggcgaaacaggcttaacgtatcggacaccgcccgaataaaaggagcgctgctagtaaaaccaatgcgcaactcccccgcttcaccctgatgcagcctttcagcgcgagcggcagcgtcatccaccatagacaggatttgccgactatctgcaagaaactgttttcctgctgccgtcagcaatacactgcgattggttcgtgccagcagtcgggcaccaatttgttgctccagcgcctgaatctgctgacttagcggcggttggctaatattcaggcgggcagcggcgcgcccgaaatgcagctcttccgcaacagcaacaaagtaacgcagatgacgaagttcaatattcatatttaaaacatcttatttgagattattaatatattagacagaacaattcgattttcctaccctatgtataagcctgatctacaggcatatttagcaaggatttcaagtgagccgtactacaactgttgatggcgctccggcaagcgacactgacaagcaaagcatttctcagccaaatcaatttattaaacgcggtacgccgcaatttatgcgcgtcaccctggcgctgttctctgccggactggcaacatttgcacttctctattgtgtgcagcctatccttccggtgcttagccaggagtttggcttaacccccgcgaacagtagtattagtctgtccatttccacggcgatgttggctattggtttgctgtttactggcccgctatccgatgccattggtcgcaaaccagtgatggtcacggcgctactgttggcctccatttgtacgttacttagcacaatgatgaccagctggcacggcattttgattatgcgcgccttgattgggcttagcttaagtggcgtggcagctgttggcatgacttatcttagcgaggaaatccatcccagtttcgtggcctttagtatggggttgtatatcagcggcaacagtattggcggcatgagcggacgcttaattagcggtgtcttcacggactttttcaactggcgaattgctctggcggcaatcggttgtttcgcgctggccagcgcgttgatgttctggaaaatcctccctgaaagtcgccattttcgcccgactagcctgcgccctaagacgttgtttatcaactttcgtctgcactggcgtgaccggggattaccgttattgttcgcagaaggctttttgctgatggggagcttcgtcacgctgtttaattacatcggctatcggttgatgctctccccctggcatgtcagtcaggccgtggttggcttattaagcctggcttatttgaccggtacatggagcagtcccaaagccggaaccatgaccacccgctatgggcgtggtccagtgatgttgtttagcacgggggttatgctgtttggtttactgatgaccttattcagcagcctgtggctgatctttgccggaatgttactcttcagtgcaggattcttcgcagcccacagtgtagccagcagctggatcggcccccgcgcaaaacgcgctaaaggccaggcctccagcctgtatctgttcagttactatctggggagcagtattgccgggacgctgggtggtgttttctggcataactatggctggaacggcgtcggcgcatttattgctctgatgctggtcattgctctgctggtcgggacgcgtttgcatcgtcgtctgcacgcctgaaaaataagtccggactgcggtaaatacccgtccggacttattgccagctcaaaccaacgttaatagccatcctaaaatagacgaagcgccagccaattcccgcagcgcgtctagcgtcatcaggattataagtacccaaataaacggattcattttgctgtgtgtcatttattactgatgcgcagttattctactgctttgtaagtagtaaaatagttaacccgatcaagactactattattggtagctaaatttcccttaagtcacaatacgttattatcaacgctgtaatttattcagcgtttgtacatatcgttacacgctgaaaccaaccactcacggaagtctgccattcccagggatatagttatttcaacggccccgcagtggggttaaatgaaaaaacaaattgagggtatgacaatgaaaaaagtattagctctggttgttgccgctgctatgggtctgtcttctgccgcctttgctgcagagactacgaccacacctgctccgactgcgacgaccaccaaagcagcgccggcgaaaactacacatcataaaaaacagcataaagcagcacctgcccagaaagcgcaggcggctaaaaagcatcataaaaatacgaaagctgaacagaaagcccctgaacaaaaagcgcaggcagcgaagaaacacgccaagaaacacagccatcagcaaccggcaaaacctgctgcacaacccgcagcgtaagttttcaacagtaatgctggcgcgccccctcgcgcctgaaaattacggtgctaagcgggtaacgtttagcaccgcctttagcggagggtagtatggtgggccgttatcgctttgagttcattctgatcatccttattttatgcgcactgattaccgcccgtttttatctttcctgattgtagttatctgattttactcccactttcatcccgtcccgtctatagtatttatgagggtttgcttttaataatcataattacccaccagagtgtgatatgcgtacaaccattgctgtagtgttgggtgcaattagtttgacgtctgcttttgtgtttgcagataaaccagacgttgccagaagcgcaaacgatgaggtcagcaccctgttttttggtcatgatgatcgtgtgccagtgaatgacacgacccaaagtccgtgggatgcggttgggcaactggaaacggccagcggcaatttatgtacggcgacgctgattgcacccaatctggcattaacggcaggacactgtttattgacacctccaaagggtaaagccgataaagcagtggcgctgcgttttgtgagtaataaaggtctttggcgctatgagatccacgacatagaaggccgcgttgatccgacactgggaaagcggttaaaagcagatggggatggttggattgtacctcccgcagccgcgccgtgggacttcggattgattgtgctacgtaatcccccttctggcattacgccgttgccgttatttgagggagataaagccgcgcttaccgccgcattaaaagcggcaggtcgtaaagtgactcaggcaggctaccctgaagatcatctcgatacgttgtacagtcatcaaaactgtgaagtgactggctgggcgcaaacgagcgtgatgagtcatcagtgcgataccttgccgggtgacagcggtagccctctgatgttgcataccgatgacggctggcaattaattggggtgcaaagtagcgctcctgccgcgaaagatcgctggcgcgccgataaccgggccatttctgttaccggttttcgcgacaagctggatcaactgagccaaaaataatgttcaaacgctgcccgacagcgcgggcagcgtcttcatcaggcaagtttcaccatgatcattccagccaacagcaagaccaggccaatccagcctttacgatttaaccgttgaccaaacaagatccaacctgcggctaacgtggcggcaataccaaacccgccccacaatgcataagcgacagacaagtcgatccctttaacggcttgagaaagcgcactaaaggcagccagcaccgccgccagggagagcaagccaaatattttgcgacgaaagccgtcagaaaatttcaaaaagacgttagcaacgatttccagcacgattgccaatgccagccaggcggcgtgaacccattcaaactgcgccatggttcacctccagttcaggtttacgcgctttacgggtaccactttttatcaacacaatcccggcgaccagggtggttaacccggcaattttcatcaggcttaaactttcgtcgaataacaaaacgctaaacaaggtaataaataaaataccgataccttcccacagcgcataagctacgcctaaggcgatttttttaacggcgaaagagagaaatatatagctcagagaaatcatcaccagcattaaaataaagccgccatttccctcactgacgctcgcccatttcatactcagcgtaccggtaatttctgtagcaatagccagacctaataaaatccaataaatatacattgtccttctcctgcaagagaattattttaattttcgcttaattcagcgaaaccaaagtaaagtggtcaagccccgcgcatagcgcaagctttggcagaagaaaggactaaagcgcgttgcgccagtgctgctcacctacgagcaagatagtggatgaggtacgaagatgggtaaatgtagaaaataacgtcctgaacaaattgtccataatattacaattatccgcagtgttgcttctcgtcatcgcggatgataattgtcctcggtagttgaacacgcctgatttgtatcatagcttaagaattaactcaaaatattttcacttctttacctgagcggtttgattttcgttatgatgacggagcgaaaaagacattattattagcaaaggaagaaaaaacggggacaagcatggcaaagccgatcatcacgctcaatggcctaaaaatcgtcattatgttgggaatgctggtcattattctctgcggtatccgttttgccgccgagatcatcgtgccgtttattctcgcattatttattgctgttattcttaacccgctggtgcaacacatggtccgctggcgtgtgccgcgtgtactggcggtgagcattttgatgaccatcatcgtgatggcgatggtgttgctattagcttatctgggttccgcgctcaacgagttgacgcggacgttaccgcaatatcgcaactctattatgacgccgctgcaagcgcttgaaccgttgttgcaacgcgtagggattgacgtcagtgttgaccagctggcgcattatattgatccgaacgcggcgatgacgttgctcaccaacttattgacgcagttatctaatgccatgagtagtatatttttattgctgctgacggtgctgtttatgctgctcgaagtgccacaattgcccggaaaatttcagcaaatgatggcgcgtccggttgaagggatggcggcgattcaacgtgcgattgacagtgtttctcattatctggtgctgaaaacagccatcagcatcatcaccggcctggtcgcctgggcgatgctcgccgcactcgatgttcgcttcgcttttgtctggggattgctggcctttgcgcttaattacatcccgaatattggtagtgtcctcgcggcaatcccccctatcgctcaggtactggtgtttaatggcttctacgaagcgttgctggtgctggcgggatatctgctgattaatctggtcttcggcaatattctggagccgcgtatcatggggcgtgggctggggctttccacattggtggtatttttgagcttgattttttggggatggttgttaggaccggtgggtatgctgctttccgtgccgttgacaattattgtcaaaattgcgcttgaacaaacagcgggaggtcaaagcatcgccgttctgttaagcgatctcaataaagagtgacggcctcagcagaggccgtcagggttacagagctttcaggattgcatccacgctggctttggcgtcaccaaacagcatgtgggtgttttccttgaagaacagcgggttttgcacaccagcatagccagtgttcatgctacgtttaaagacaatcacgttctgcgctttccacacttccagcacaggcataccagcaatcggactcttcggatcatcctgcgccgccgggttaaccgtatcgttagcaccaatcaccagtacggtatcggtatcagcaaagtcatcattgatctcgtccatttccagcacgatgtcatacggtacttttgcttcagccagcaatacgttcatatgtccaggcaaacgccccgcgaccgggtggataccgaaacgcacattaataccacgagcgcgcaatttctcagtaatttcagcgacaggatattgcgcctgcgcgactgccatgccgtaccccggagtaatgatcacactatgggagtttttcagcagttccgctgtctcttctgcggtgatttcgcggtgctcacccacttcctgatcatcgccagtagaagagccgtcggtgccgaaaccacccgcaataacgctgataaaggaacggttcatcgccttacacataatgtaagaaaggatagccccgctagaaccgaccagcgcaccggtcacaatcagcaggtcgttgctgagcataaagcccgcagccgcagccgcccagccggagtagctgttcagcatgctcaccaccactggcatatctgcaccaccgatggaggcgactaaatgccagccgaataccagcgcaattgcggtcattatcagcaatgccagcacttgcaggccgacgctgtccgtgcgaacaaatacaatcagcagcaggaaggaaacgaccagagccgccaggttcattttgtgacggtttggcagcatcaatggtttagagctaatcttgccacacagtttgccgaacgccaccacgctacccgtgaacgttaccgccccgatgaagataccgaggaacacttccgtcaggtgaatattgaccagaatcggtgccattcccgcgtcatgatgcagatagctgttaaagccaaccagcactgccgccagacccacgaagctatgcaggatcgccaccagttctggcatttcggtcatttcaactttcttcgccagacggataccaattgccccaccaatgaccatcgccagcaagatccagccaacattacccgtatccggtccaaaaatggttgcgattaacgcaatcgccatcccggcgataccgaagttgttaccctggcgagacgtttcatgtttgctaagaccggccagactgaagataaacaggatcgcggcaacaatgtatgcagctgtaactaatcctccagacatatgttaccccttaatttttgcggaacattttcagcatgcgctgagtcacggtgaagccaccgaaaatattaatgctggctataagcaccgcgataaaactaaggaagctaacccagccgccctggccaatctgcaacagtgctccgacaacaataatcccactaatcgcgttggtgacgctcatcaacggtgtatgcagcgcgtggcttacattccacaccacgtaataaccgacaacgcaggccagcgcgaaaacggtgaagtgcccaaggaattctttcggcgcaacgcttgccatccagccaaaaagaatgattgccagcgccatcaacgcgtatttacgccacggactgcaggtacatttttcctcagttttcacttccggtgccgctttttgtgccgcctgcggctgagcacttacctgaatcggcggtgccggccaggtaatttcgcccgcacggatcacggtcacgccgcgaatcaccacatcatcaaaatcaacagtgatattgccgtctttctctttgcacaacagtttcagcagattaacgaggtttgtgccgtaaagctgactggattgcgtcggcagacggcccggaagatcggtataaccaatcactttgacaccattttccgtagtgaagatttcacccggcacggtgtattcacagttgccgccgttttgggctgccaggtcgacaatcacactgcccgccttcatggagtcaaccatttcacgggtaattagcttcggcgctggtttgcctggaataagcgcggtggtgacaatgatatcgacctcttttgcctgggcggcaaagagttccatttccgctttgatgaacgcgtcgctcatcactttggcatagccatcgccgctgccagcttcctctttaaaatccagctcgaggaattccgcgcccatactttgaacttgttctttcacttccgggcgggtgtcgaatgcacgcacaatcgcgccgagactgtttgctgcgccaatggcggccagacctgcaacacccgcaccaatcaccatcacttttgccggtggcactttcccggccgcagtaatttgcccggtaaagaagcgcccaaattcatgtgccgcttcaacaatggcgcgataaccggcgatgttcgccatgctgcttagtgcgtccaggctttgtgcgcgactgatacgcggcacagagtccatcgccatcacggtcacgttacgttccgcaagtttttgcattaattccggattctgcgcaggccagataaaactcaccagcgttgtcccaggattcagtaacgcaatttcatcatctaacggcgcattgaccttcagaatgatctcactctgccagacgctattcccttctacaatttcagcgcccgcttgcacaaacgctttatcgtcaaaacttgccagttgacccgcgccgctctctaccgcgacggtaaaacccagtttcagcagctgttccactgtttttggcgttgctgcaacacgggtttcattggttaaccgttctcttggtatgccaattcgcatgatattcccttccatcggttttattgatgatggtttgcctgtgtcaggagccacacaagctgctcatgtacgagctaaatgttactccgttaaaataaattagtaacaaacgccctataacgtactgaaaattatgcctgtgatctagcgccaaaaatcagtatttcggcgtgaactcgcaaaatattaacgattcagccgtgatagtgggataaacaccttagaacgccggataaagactgataattgtcttcgacggtcgggtaaaacgagacatcgccccggcacgaatcactacttaacattaaattaacttatacaattcagttgcttcagtagtaatgatgctgatacggctgttttttaagcatagacggtcatttgagcaggattaaaattggcttaaggaatgtgatatgaaaaatgacgcagacagttacaccgtttaaatgcaataatcagccacgtttctcgttaataacaataccagtacctggtttgcgcaaggcgaaggattatttttatgaagcttaagaacaccctcctggcgagcgcactgctttctgctatggcattctccgttaacgcagcaacagaactgacaccggagcaagcggcagcggttaaaccttttgaccgtatagtggttaccggtcgttttaatgctattggcgaagcggtgaaagccgtttctcgtcgcgcagataaagaaggtgccgcctctttttatgttgtcgacacttctgattttggtaacagcggtaactggcgtgtggtcgctgacctctataaagccgatgctgaaaaagcagaagaaacaagtaatcgcgtaattaacggtgttgtcgaactgccgaaagatcaggctgttctgattgaaccgtttgacacggtcaccgtccagggcttctatcgtagccagccagaagtcaatgatgccatcaccaaagcggcaaaagcgaaaggtgcctactctttctacatcgttcgtcaaatcgatgccaaccagggcggcaaccagcgtattactgcattcatctataaaaaagatgctaagaaacgtatcgtccagagcccggatgtgatcccggcagattccgaagcaggacgtgcagctctggctgccggtggcgaagccgcgaagaaagttgagatcccgggtgttgcgactaccgcaagtccaagttctgaagtcggtcgcttctttgaaacccagagtagtaaaggcgggcgttacaccgtcacgctcccggatggcactaaagtcgaagaactgaacaaagcgaccgcagcgatgatggtcccgttcgacagcatcaaattctctggcaactacggcaacatgaccgaagtctcctatcaggttgcgaaacgtgccgcgaagaaaggtgctaagtattaccacatcacccgccagtggcaggaacgtggtaataacctgaccgtcagcgcagatctgtataaataactattcagttactcctataaggcggcttgatgccgcctttcgcatttttagtcacaaatttccccgcgaccattgcatgcagacacatctcttcgtaaaatcccgcgcttcagtggcaaactccatttttatgcgttttgccctaatatttattcttcttatcacgttttaatcactggatatcgatggaaaagaaactgggactgagcgcactcaccgcgctggtattaagcagtatgctgggcgcgggtgttttcagtctgccgcaaaatatggcggcagttgccagcccggcagcactgctcatcggctggggtattactggcgctggcattttattgctggcctttgccatgctgatcctcacgcgcattcgtcccgaacttgacggcggtatctttacctatgcccgcgaagggtttggcgagctaatcggcttttgttccgcatggggatactggctgtgcgcagtcatcgccaacgtctcctatctggtgatcgttttttccgcgttaagcttttttacggacacgccggaattgcgcctgtttggcgatggtaatacctggcaaagcatagtcggtgcaagcgctttattgtggattgttcactttttgatcctgcgcggggtgcaaaccgctgccagcattaacctggtggcgacactggcaaaattgttgccgctgggtctgtttgttgtgctggcgatgatgatgttcaaactggataccttcaagctcgacttcaccggacttgcacttggcgtacccgtttgggaacaggtgaaaaacaccatgctgatcaccctgtgggttttcattggtgtggaaggtgccgtggttgtttctgcgcgtgcgcgtaataaacgtgatgttggcaaagcgacactgctggcggttctctccgctctgggcgtttacttgctggtaacgctgcttagcctgggtgtggtggcacgtcctgaactggctgaaattcgtaacccgagtatggccggtctgatggtggaaatgatgggaccatggggcgaaatcatcatcgctgccggtttgatcgtttccgtttgcggcgcgtacttaagctggaccatcatggcagcagaagtaccgttcctggccgccactcataaagcattcccgcgcatttttgcgcgccagaacgcacaagctgcgccatccgccagtctgtggttgaccaacatctgcgtgcaaatttgtctggtactcatctggctgaccggttccgattacaacacgttgctgaccatcgccagtgaaatgattctggtgccctatttcctggtcggcgcgttcttgctgaaaatcgcaacccgtccactgcataaagcggtaggtgtcggtgcctgcatttatggcttatggttattgtacgcctctggtccaatgcacttgctgttatccgttgttctgtatgcaccggggctgctggttttcctgtacgcgcgcaaaacgcatacccatgataatgtactgaaccgtcaggaaatggtgctgattggcatgctgttaattgccagtgttccggcgacctggatgctggtgggataacgttcatcccatcgttggatagcaaaggagataacgatgggtaaaacccagcccttgccaatattaattactggcggaggtcgtcgcatcggcctcgccctcgcatggcatttcattaatcaaaagcaaccggtgattgtcagctatcggacacactatccagccattgatggactgattaatgcaggtgcgcagtgtattcaggctgattttagcaccaacgacggtgtgatggcgtttgccgatgaagtactaaaaagcacccatggtctgcgtgctattttgcataacgccagtgcgtggatggcggaaaaaccgggtgcgccactggccgacgtactggcttgcatgatgcagatccacgttaataccccatacctgctcaaccatgcgctggaaagattactgcgtgggcacggacacgccgccagcgatatcattcactttaccgattatgtggtggagcgcggtagcgacaaacatattgcgtatgctgcaagcaaagcggcactggataatatgacccgcagctttgcccgcaagctggcaccggaagtgaaagtgaattctattgcgccaagcctgatcctgtttaatgaacatgatgatgccgaatatcgacaacaggcgctgaataaaagtctgatgaaaaccgcgcctggcgagaaagaagtgatcgacctggtcgattacttacttaccagttgctttgtcaccggacgcagtttcccacttgatggcggtcgtcatctgcgttaatgcagctttatccagcatataatcaacacccatgcgcttatcccccaacacgcaacagaaccaacaaaagcggcgggcaagcgcatcattccggtgaaataccacaggctcaccaggtaaacaaaatagggaataatgctccacatactaaaaatgatggttgcgcgtaaggcttcaatgccgcgttcgctggcaacaatataatgcgcgataagcgcaaaggtcgggaaaagtggaatcagcccggcgatataataatttttcgtttttgctaaaacaccaatcaacagcactaccagcgcaccgagcgcggctttgattaccagccccatctttttaccttaacacttccataacaagtcatcagtagaatacctgatgaaaacttgtttagaaacgattgatagtaagtaaaaacagcgcggtgtattgtgacgtttttatatctaccgtgaatgttatgaacactatcgtatttgtggaagatgatgcggaagtcggtagtctgattgccgcgtacctggcaaaacatgatatgcaggttaccgtagagccgcgcggcgaccaggccgaagaaaccattttgcgagaaaatccggatttggtgttactcgacatcatgctaccaggcaaggacggcatgaccatttgtcgtgatttacgcgcaaagtggtctggaccgattgttcttctaacctctctcgatagcgatatgaaccacatcctggcactggaaatgggtgcctgcgactatattctcaaaacgacgccccctgctgttttgctagcgcgtttacgtttgcatttgcgtcagaatgagcaagccacactgaccaaaggtcttcaggaaacgtctctgactccctacaaagccctgcatttcggcacgttgaccatcgatcccatcaaccgcgtagtcaccctggctaacactgaaatcagcctcagcacagctgatttcgaattattgtgggaattagctacccatgccgggcaaatcatggaccgcgatgcattgctgaaaaatttacgcggcgtcagttatgacggactggatcgtagcgtggacgtggctattagccggttaagaaaaaaactgctcgataacgccgcagaaccttatcgcattaaaactgtgcgtaacaaaggctatctttttgcgcctcatgcatgggaataagcgatgaaaaaactgtttatccagttttacctgttattgtttgtctgcttccttgtgatgtctctgctggttgggctggtgtacaaatttaccgccgaacgcgcgggcaaacagagcctggatgatttgatgaacagtagcctgtatctgatgcgcagcgaattgcgtgagatccccccacacgactggggtaaaactctgaaagagatggatttaaatctctctttcgatctgcgtgtcgagccactgagtaaataccatcttgatgatatttccatgcaccgactgcgtggcggcgaaattgtcgccctggacgatcagtacacgtttttgcagcgtatcccgcgcagccactacgtgctggcagttggtcctgttccttatctttattatctccatcagatgcgattgctggatatcgccctgatcgcttttattgctatttccctcgcctttccggtgtttatctggatgcgtccgcactggcaggatatgttaaaactggaagcagcggcgcaacgatttggcgatgggcatctcaatgaacgtatccactttgatgagggtagcagctttgaacgacttggcgtcgcatttaaccagatggcggacaatatcaacgccttaattgccagcaaaaaacagcttattgacggtatcgctcacgaactgcgaacaccgttagtgcgcctgcgttatcgactggagatgagcgataacctgagcgccgccgaatcccaggcgttgaatcgtgatatcagtcaacttgaagctttaattgaagagctgctgacttatgcccgactcgatcgcccacaaaacgagcttcatcttagcgaaccagacctgccgttgtggctgagtacgcatctggcagatattcaggcagtaacgcccgataaaacggtacggataaaaacgctcgtgcaaggccattatgcggcgttggatatgcgcttaatggagcgcgtgctggataatttgctcaataacgccctgcggtactgccatagtacggttgaaaccagcctgctactgagcgggaatagagcgacattaattgttgaggatgatggcccagggattgccccagaaaaccgcgaacatatctttgaaccttttgttcgcctcgatcccagccgggatcgcagtaccggcggctgcgggctggggctggcaattgtccactctatagcactggcaatgggcggtacggttaattgtgacaccagcgaactgggtggtgcccgcttcagctttagctggccgttatggcataacatcccgcaatttacctctgcctgacactacgcgcacgatggtcaagtcaccacgactgtgctataaaataagtatgttgtaactaaagtggttaatattatggcgcgttacgatctcgtagaccgactcaacactacctttcgccagatggaacaagagctggccatatttgccgctcatcttgagcaacacaagctattggttgcccgcgtgttctctttgccggaggtaaaaaaagaggatgagcataatccgcttaatcgtattgaggtaaaacaacatctcggcaacgacgcgcagagcctggcgttgcgtcatttccgccatttatttattcaacaacagtccgaaaatcgcagcagcaaggccgctgtccgtctgcctggcgtgttgtgttaccaggtcgataaccttagccaagcagcgttggtcagtcatattcagcacatcaataaactcaagaccacgttcgagcatatcgtcacggttgaaagtgaactccccaccgcggcacgttttgaatgggtgcatcgtcatttgccggggctgatcacccttaatgcttaccgcacgctcaccgttctgcacgaccccgccactttacgctttggttgggctaataaacatatcattaagaatttacatcgtgatgaagtcctggcacagctggaaaaaagcctgaaaagtccacgcagtgtcgcaccgtggacgcgcgaggagtggcaaagaaaactggagcgagagtatcaggatatcgctgccctgccacagaacgcgaagttaaaaatcaaacgtccggtgaaggtgcagccgattgcccgcgtctggtacaaaggagatcaaaaacaagtccaacacgcctgccctacaccactgattgcactgattaatcgggataatggcgcgggcgtgccggacgttggtgagttgttaaattacgatgccgacaatgtgcagcaccgttataaacctcaggcgcagccgcttcgtttgatcattccacggctgcacctgtatgttgcagattaacgcccggctttcatactgccgaccatctgttctggccgtacccagctgtcaaactcggcttcgctaagataccccagcgcaagggccgcagcttttaaggtcagcccttctttatgcgcttttttggcgatctcggcggctttgtcataaccaatgtgggtgttaagcgcagtcaccagcatcaggctttcattgagtaattgattgattcgctcacgattcggttcaatacccactgcgcagtgtttgttaaaactttccatgccatctgccagcaagcgcacgctttgcaggaaattgtggatcaccattggacggaagacgttcagttcaaagttaccggaagcgccccccatgttgatcgccacgtcgttccccatcacctgacagcagagcatggttaatgcctcacactgtgttgggttcactttccccggcatgatactgctgcccggctcattttccgggatactgatttcaccaattccgcagcgcgggccagaggccagccagcggacatcattggcgattttcatcagactcgcagccaaccctttcaacgcgccgtgcgcctgaaccagggcatcacaggtcgccagcgcttcaaatttgttcggcgcggtaacaaacggtgcacaggtaatgactgccagttcatctgctacgcgacgcgcatactccggatgggtatttagtccagtacccaccgctgtaccgccaagagccagttccgctacgtgaggcaggctgtattcgatatgtttgagattatgctcgagcatcgctacccagccggaaatctcctgccccagcgttaacggcgtggcatcctgcaagtgagtacgaccaattttgacgatatcggcaaaagcacgggatttctcattcagtgtctgtgtcagggttttaagctgaggaatgagttgcttgcgcagcgccagcagcgccgcaacgtgcatcgccgtcggaaagacatcgttggaactttggcttttgttcacgtcgtcgttagggtgaactttacgttccatcccgcgcacaccgccgagtaattcactggcccggttagccagcacttcgttcatgttcatgttactttgcgtgccggagccggtctgccagatagccagcgggaattcgtcgtcatgctgtcctgccagtacttcatccgccgcctgacgaatggcgctcgctttctcttcagacaacaagcctaaatcttcattaacttttgccgctgcacgcttggttagcgccagcgcatgaatcagactggtgggcattttctccgtgctaatgcggaaatgctccaggctgcgttgagtttgtgcgccccacagcttatctgccgggacatcaatcgcccccatgctatctttttcgctgcgtactgtattcatgacctgctcctcacctgattaattttttctttctgttttgctttcgttaagcaacttttagctcacttattatttaccatttgataacaaatgtttggtctttcgtgccatgtaaaaaaaccgccccgaagggcggctctgtttatttcacacagcgggtgcattgtgtgagttgtatctgctggaagaagtcatttcctttatcatccacaaggataaacgccgggaaatcttccacttcaattttccagatggcttccattcccagttccggatattcaacacattccaggctcttaatacttccctgcgccaatacagcggccggaccaccgatactgccaaggtagaagccgccgtgttttttacaggcatccgtcacctgctggctgcggttgcctttcgccagcatgatcatacttccgccctgcgcttgcagttgatcgacataagaatccatccgtccggcggtcgttgggccaagagaaccggaggcataaccttccggcgttttggccggacccgcgtagtaaatcggatgatctttgatgtactgcggcagcccttcaccgttatccatccgctctttcagtttggcgtgagcaatatcacgaccgacgataatcgtgccgttaaggcttaagcgtgtagaaacgggatactggctcaactgtgcgaggatctctttcatcggacggttaaggtcaacgcgcaccgcttcgccttctcccgctttgcgcagctcttccgggatatatttgcctggattatgttccagtttttcgatccagatcccctgacggttgatcttcgctttgatattacggtcagcagagcaggagacgcccataccgaccgggcaggatgcgccgtgacgtggcaggcgaatcacgcggatgtcgtgagcgaagtatttaccaccaaactgcgcacccagaccaagattttgcgcttcgatcagcaattctttttccagttccacatcgcggaacgcctgaccgtgctcattcccttccgttggcagttcatcatagtatttcgcggaagccagtttcaccgttttaaggttcgtttctgcagaagttccaccaataacgaacgcaatatgatacggaggacaggccgccgtacccagcgtgcgcatcttctcaaccaggtaatttttcagtttccccggcgtcagtaacgctttggtttcctgatagagatacgtcttgtttgcgctaccaccacctttggcgatacagaggaatttgtattcgtcgccatcaacggcataaagatcgatctgcgctggcagattggtgccggtattcacttctttatacatatccagcggcgcgttttggctgtagcgcagattatcttcgatataagtgttatagacaccgcgcgccagcgccgcttcatcaccaccaccggtccatacacgctgcccttttttaccaacaataatcgcggtgccggtatcctgacaggttggcagaacgcctttcgccgcgatgtcggagttacgcaggaattgcagcgccacatatttatcattttcgctggcctccgggtcacgcagaatgtcggccacctgttgttggtgcgccggacgcagcatgaagctcgcatcatgaaacgcctggcgcgccaacagagttaacgcttcgggtgcgactttcaaaatctcctgcccttcaaattcagatacgctaacgtgttcgctggttagcaggtaatactcagtatcatcttttttgagtggaaaaggagcctgataatgaaagggtttgttactcattgttctctcacttactgcctggtttggttatgctctgggcgggtgttccgttgccctgttaaaagcgagtaacaatatcctacacacttttttaacaaaaactgagactagtacgactttttgcggctccaggttacttcccgtaggattcttgctttaatagtgggattaatttccacattaaaacagggattgatcatgcaaaaactcattaacagtgtgcaaaactatgcctggggcagcaaaacggcgttgactgaactttatggtatggaaaatccgtccagccagccgatggccgagctgtggatgggcgcacatccgaaaagcagtagtcgagtgcagaatgccgccggagatatcgttagtctgcgtgatgtgattgagagtgataaaagcactctgctcggagaggccgttgccaaacgctttggcgaactgcctttcctgttcaaagtattatgcgcagcacagccactctccattcaggttcatccaaacaaacacaattctgaaatcggttttgccaaagaaaatgccgcaggtatcccgatggatgccgccgagcgtaactataaagatcctaaccacaagccggagctggtttttgcgctgacgcctttccttgcgatgaacgcgtttcgtgaattttccgagattgtctccctactccagccggtcgcaggtgcacatccggcgattgctcactttttacaacagcctgatgccgaacgtttaagcgaactgttcgccagcctgttgaatatgcagggtgaagaaaaatcccgcgcgctggcgattttaaaaagcgccctcgatagccagcagggtgaaccgtggcaaacgattcgtttaatttctgaattttacccggaagacagcggtctgttctccccgctattgctgaatgtggtgaaattgaaccctggcgaagcgatgttcctgttcgctgaaacaccgcacgcttacctgcaaggcgtggcgctggaagtgatggcaaactccgataacgtgctgcgtgcgggtctgacgcctaaatacattgatattccggaactggttgccaatgtgaaattcgaagccaaaccggctaaccagttgttgacccagccggtgaaacaaggtgcagaactggacttcccgattccagtggatgattttgccttcagcctgcatgaccttagtgataaagaaaccaccattagccagcagagtgccgccattttgttctgcgtcgaaggcgatgcaacgttgtggaaaggttctcagcagttacagcttaaaccgggtgaaagtgcgtttattgccgccaacgaaagtccggtgactgtcaaaggccacggccgtttagcgcgtgtttacaacaagctgtaagagcttactgaaaaaattaacatctcttgctaagcttattaaaggcttataacaccttcaggcggccagtccgcctgatttcattttatggataatcattatgaataaaagcctggtagcggtaggcgtcattgttgcgctaggcgtagtctggacaggcggcgcatggtatacaggcaagaagattgaaacccatctcgaagacatggtcgcgcaggcgaacgcgcaactcaaactgacagctcctgaatccaacctggaagtgagttatcaaaactatcatcgcggcgtattcagcagccagttgcaactgttggtgaaacccattgccgggaaagaaaatccgtggattaaaagcggtcagagcgtcatcttcaacgaaagcgttgatcatggtcccttcccgcttgcccagcttaaaaaactgaacctgatcccgagcatggcaagtattcaaaccacgctggttaataacgaagtaagcaaaccactgtttgatatggcaaaaggtgaaacgccttttgagattaacagccgcattggttacagcggtgattccagttccgatattagcctcaagccactgaattacgagcaaaaggatgaaaaagtcgcctttagcggcggcgagttccagttaaatgctgacagagacggcaaagccatctccctttccggggaggcgcaaagtggtcggatagacgcagttaacgaatacaaccagaaagtgcagttgacctttaataatctgaaaaccgacggttccagcacgctggcaagttttggtgagcgtgtaggaaatcaaaaactgagtctggaaaaaatgaccattagtgtggaaggcaaagaactggcactgctggaaggcatggagatcagcggtaaaagcgatctggtcaatgacggtaaaacgatcaatagccaactggattacagcctaaacagcctgaaggtacagaatcaggatctgggcagcggcaagctgactttaaaagtcggccagattgatggtgaagcctggcatcagtttagccagcaatataacgcgcaaactcaggcgctgctggcacagccagaaattgccaacaaccccgaactttatcaggagaaagtgacggaagccttctttagcgccctgccgctgatgctgaaaggcgatccggtgattactatcgcgccgctaagctggaaaaacagtcagggtgaaagtgccctgaatctgagcctgttcctgaaagatccggcaacgactaaagaagcgccgcaaacgctggcgcaggaagtagatcgtagcgttaaatctctggatgcgaaactgaccattccggtggatatggcaactgagtttatgactcaggtagcgaagctggaaggttatcaggaagatcaagcgaaaaaactggcgaaacagcaagttgaaggtgcaagtgcaatggggcagatgttccgtctgaccaccttgcaggacaataccatcaccaccagcctgcaatatgctaacggtcagataacgttaaatgggcagaaaatgagcttagaagattttgttggcatgtttgcgatgccagctcttaacgttccggctgtaccggcaattccgcagcagtaattcacggccaaaacgccggagaattttcactccggcgttttcatctgaaaacaaaccagagattgcctgatgcgctacgcttatcaggcctaccttttcctgcaacactttgaatttatgagtttttgtaggctggataaggcgtttacgccgcatccggcataaaaaacgcgcactttgtcaacaatctgaaacgccggagatttttctctccggcgttattttttacttcagcataaagtcatactgaatactcattttcacatcccagtaattcaggcgatcgcccagcgtactgccatcgcgcttttcccgccctttatcggcagcaagaaagaaattcatcccttgtaacggcccttcgctgacccgatagttcataccacctaagatacccgtgccttcaatccgcacatctcgtttactggattcatagccgcgagtcacaatcggtgcaaatgtcagcgtaaattgcggcgttaaacgatagttgacgcccaattgccaggactgcattccttcacggttacgatcaagacttaaactaaagggatagccaatgtcggtatccaccacggcaccattcattgcatggcgcaaataaccaccactgccaaatacacttccccacggcgcattccaggtcaattgtccactaaccaacgccgtttcattgggctggctggtattacgacttaaaccttcgagctgcgcgtaaaagccgagcaactcccctttcaacgtataattcgggtcgagcggtatgcttttctcgagaatactttgtatctgattggaaacatctttctgtacgcttgcccccagagaatagcgactggtatcatcatgccaactggcggctaaaaaagaacgtgcgcgatgtttatcgtattttcccgtctggctgttatacaccccttcatcacgaataccggttgtactatcagtccataaaaatactcgactacgccacattccccacagatcaatatttggtgttaaagcccaataacctaatgctccttcagaaactgtcggtaatgtacgttggctactgccagccattaacggaatacgataaggtaagctaccataactataatccgtcccgaagcgacctaatttaagcaggctattttcactgggttttatttttactgcccccagggcaaagccaaaacttttatcaccatcaagataccaccgggtactcatatcagcacgagcacctaatttataaacataatacgccccgccttcaacgccaataatattggaataataaccactattgaaatcgagcaatcctccctgtacccatgcgtaaatatctcttcccgcgccagcactgggcttatccgccctgcgcaattcgtttttcagtctgatgcgtagtcccgcttcatcgtcagccagttgcgccgcataagcagaggtaaggccagaggcagccgtcaggcaaataacggccatggccactatttttctcatagttgcacctttgatgttctgattatttttattgaatattaattagtgatatcgctgattaattgctgctgcacttttttacgattatcaatttcaaccacgatttctttgaattttttatccgtgagcggataaaaccagataataacgaatgccagtagcataaatccgcaaggtactaaggcaatacttgtgcggatgcccataataacttccggcgtttgcacctgattggcgatatatccgcttaaccccaaaataaaggcaggaatactacctccgattgcctgaccgcatttacgggtaaaactgaatagactataggtgagcccttcaattcgcacgccggtcaggtattcaccgtattctacggtatcagcttccagcgcccacatcacggtcatggtaacgccctgaccaatactagcgatggccaacgcaaccaacgccaccggcagactccagacggaaacccagaagaacagcagataaccgcaggttcccagcaaagcgccaatcaggaaggtattctttttaccgatcctcgcgaccatccccggcaccagcggtgcgcttgccacagtaccaaccaggttttgcaccagtaccagcacagtgaacagcccggtatcatttaacacatagcgcacgtagaacaagctgctggcgctgaccgcaaaggtgctaatcagcacacacagcgcaccgatgcacaacataaacagcgggcgattccgtttcagggtttgcagactgatattcaaactcggctgcgcaacgatacgtaccacattctcacgcgtgcttttgaagcagatgaagtaaagcaccattccggcaatcgccagcacaattgtccagaaatggtatacgctcaccatctcttccgggctggagttcttaatgctcggtcctatcagaaatgccaggcagacaaaggtcaaactagcggcaatcccacgagccgcgcccagacgggcgcgggattgtggttgttgggtcatcgcggtagcaagactaccataaggaatattcaccaggctgtagcaaagcccgaggcccatgtaggtcaaatatgcatacaccactttgctaccatggctccagtcggtcagcacccagaataccagcacgctgaagatcattaacggcgcagtaccgaagagtaaaaacgggcggaattttccccagcgggtattcacactgtccaccactcgtccggcaaagacgtcggcgaaggcatcgaatacccgcaccagtaacagcatggtgcccgccgcagcggcaccgacgccagcgacgtcggtgtagtaactcaacaggaagagcgcccccattgcgaaggcgaagttattggcgacgtcaccgaggctgtagccgacgatggtgcgccaggagagttgttgattcattgtttgcctccctgctgcggtttttcaccgaagttcatgccagtccagcgtttttgcagcagaaaagccgcgctcttcggtttgcggtcgcgagtgaagatccctttcttgttaccgccaacgcgcaatatgccttggctggtcgcaaaatcggcgaaattccatacctgttcaccgacgacggcgctgacgcgatcaaagacgcggtgatacatatccagccatgcacactgatactcttcactccacatgtcggtgtacatactgtgcagcccggctaacgtatccacgccgtattcggtgatgataatcggctgatgcagtttctcctgccaggccagaagttctttttccagtaccttctctgccgtttccaaatcgccgctttggacataccatccgtaataacggttcaggcacagcacatcaaagagatcgctgatggtatcggtgtgagcgtcgcagaacattacattgacgcaggtgatcggacgcgtcgggtcgagtttacgcgttgcttccgccagtggcgcgaaatattcccgtgcaccttgcggacgggtatccggttcgttggcaatactccacatcaccacgcttgggtggtttttgtcacgcgctatcagctctttaatcgcctgtaagtgcgcttgctgagtttccccgttgactgcctcttcgctgtacagttctttcggcttgttgcccgcttcgaaaccaatgcctaaagagaggttaaagccgacagcagcagtttcatcaatcaccacgatgccatgttcatctgcccagtcgagcatctcttcagcgtaagggtaatggctggtacggtaggagttggccccaatccagtccattaatgcgtggtcgtgcaccatcagcacgttatcgaatcctttgccacgcaagtccgcatcttcatgacgaccaaagccagtaaagtagaacggtttgtggttaatcaggaactgttcgcccttcactgccacactccggatgccgacgcgaagcgggtagatatcacactctgtctggcttttggctgtgacgcacagttcatagagataaccttcacccggttgccagaggtgcggattcaccacttgcaaagtcccgctagtgccttgtccagttgcaaccacctgttgatccgcatcacgcagttcaacgctgacatcaccattggccaccacctgccagtcaacagacgcgtggttacagtcttgcgcgacatgcgtcaccacggtgatatcgtccacccaggtgttcggcgtggtgtagagcattacgctgcgatggatcccggcatagttaaagaaatcatggaagtaagactgctttttcttgccgttttcgtcggtaatcaccattcccggcgggatagtctgccagttcagttcgttgttcacacaaacggtgatacgtacacttttcccggcaataacatacggcgtgacatcggcttcaaatggcgtatagccgccctgatgctccatcacttcctgattattgacccacactttgccgtaatgagtgaccgcatcgaaacgcagcacgatacgctggcctgcccaacctttcggtataaagacttcgcgctgataccagacgttgcccgcataattacgaatatctgcatcggcgaactgatcgttaaaactgcctggcacagcaattgcccggctttcttgtaacgcgctttcccaccaacgctgatcaattccacagttttcgcgatccagactgaatgcccacaggccgtcgagttttttgatttcacgggttggggtttctacaggacgtaacataagggactcctcattaagataataatactggtcaacctttaatctgattagttaaccaattctgtgttgcacacagttatctgtgagaaacccatggaagagaaatggaaataaaaagaactgacaccgcgatcaaaaaaccaaaaactgcaatacccacagcgtgatatagatcgcattaatctttaaaacagcgttgacagaagccataaaataagcaaccgaacgttcgttcgagcgtattgggaacgataaactctcatgacatatggctacagtgaatattttggggggaattctccgaagccgggaaggataatttttgcacagagaaattacgatatgaaacgcgggcacagttatcaccagcccgccgaaaaagagagagaatcaggatgcggttaagataccgccaatcatcgcgcgtaatccctgagcaaagctcgcttcacgcgccaggtcttccgcttcgatatcggccagtacaccgtaggtcagatccagcagtaaacgactagtcattgccgtgttgatgtctgggcttatctcgcctttttgctgggcatcacgcatccgctgggcaacaaattccgtgatcgtcatatgcttatttttaagcatggcggcgacctgtgggttacgcatcccttccgccataatttcaaccaccagcgcccgttgtccaaaggcttcatgggtgagagagacaatggactcgaccatatagtcaacgaaatgaatcccttcaatcggttcccggaaacgggccagcgccctctcctggtcctgtaagataatcgcctgaatcaaggcttctttggagatgaaatggtgatagagcgtcccgggactaatggcgcaagatttacagatggctttcatgctggcactgtgaaatccattttcactaaaaatctctctggcagcattgaggatccgggtccgtgtcggttgtgcttcagtctgcatgttatccatcattaaaccattatagttagcgtgaataactagtttaccgcgttgtcaggtgagcgcctatcattgctgttgaatagtgcgaaggcacactctattcgtatacttttcactctgaaattggttaaccaatagccgtgatttggctgccagttatttagcagagacgttgatgagtttatcccggtaaacaacacgcacggttgtttaccggtccgttagtgtattaattgagctcctgtaccccaccaccggagacggtgagaatttgtccgcttacccagctcgcagcagggctgcaaaggaacagcgctgcgttagcaatatcttgcggttggcccagacgtctgatcggcgtgtgctgtaacattttttgttcaatttctggtgtaataacggatttcagggcatcggttaatattgcccccggcgcaatgccatttacccgaatatttttttcacccaggtcaaacgccatatttctgaccagatgactggccgcagctttagaacttgcataggaagtcatgtttatatttttattttctgccgccatagaagtgatggtcagaataacgccaccgccatttttttccatttctggcgcaacaagttgactcagatggaaaaaagaaaacacattcagttcataagcacggcgaaaatccgccattggcatatcaaacggtttaggtccaccgccaccggcgttgttaaccagaatatcaactttacccagcttactgatagcaaagtctgccagtgcagagagttcctgttcggaagtaatatcacaacggcaggcaaatgcctgaccacccagttgttgaatttcgtctacaacatggttagctgcgtcggcgttaatatcactgaccaccacagatgcgccagctgtcgcgaatgtaatggcgatttctttaccaatacctgcacccgcacctgtgatgatggcgcattttccgtcgagtctcaggttgtcagaattaaacacataaacctcctgtgaacttcagtaaaaataaaaggcaccgcctgtgtgccacattttttatcattaaccttgaggaaaggacactaccaggtatagcagataaagagaggattatttcgctgcaatgagccgggcgggaataataagattgcgactatgcgtctcttcatgggtgattttttgcatcatgcgatccgcaagtgtgataccaagttcccgcgctggcgtgctggcccaggtaacaggtatatcatcaagtgtggttggtgtcgcatcggtaaatgccgccaggctaacctgttgctcaaagtaacgatcgactccgctttccccgctttgccgccctgctttgagcaaaccaaaccatgcccccatcgcaatagtttcgttatagcaaaccacggcactgatggtcgggttatgacgtaaaagcgccgtgatagcttccgcggcttgcttctggctggaagtgcactccaacacccaatcgctatgaaacggcaggccaaattttagtagagttgcacaatagcccccaacccgttctgcacgggttaaactggaactttgccctcccagccaggcgatccgctgatgcccattgcgaatgagatgctccgtcaacaactgtgcagcctgcatgttgtccgggcgaaccgtatcaacatcatcaagataactggcacgggaagcgaaaatcaccgggatagctttttcttctgccatccgtcgcaggtcatcgctacttcctgcagctccggcaattaccacaccatcgacaccctgattcagtaacagactaaaccgctgtgccagctgctcaccgtctttaccgccgtgaagcaaaaaaaccatccgtccctgcgcttccagagcttccgtcaatccggccgtcaattcggcgtaaaacggcgcagataaatcacggacgatcaaaccaatgacgccgctttgcccgccgcgcagcgcgctcgcctggcgattgcgcacaaatcccagctcttcaatggcggcgttaacgcgttctcctgtggcggtagagattcgccctttgccactaagcaccaggctaacggtacttacgctcacgcccgcagccagcgcaacatcatgaatggttatttttttggcggtagccatgcagatgacctactccctgattatgtgacagataaaacgttttaccttttatttatcttatacccgctattatcgttgcgtaatgtgatttatgcctcactaaaatttgataaaacgttttatcttctcgcgcaatttactgaatccagattgttctctacgaggagtcgttttatgacggcgaaaacagcaccgaaagtcacgctgtgggagttcttccagcagttaggcaaaaccttcatgttacccgtggcattattgagcttctgcggcattatgctcggcattggtagttctcttagcagccatgatgtcataaccctgatcccggtcctgggcaaccccgtgttgcaggctatctttacctggatgagtaagattggcagctttgcttttagtttcctgcctgtcatgttctgtatcgccatcccgctgggcctggcacgcgaaaataaaggcgtagcggcattcgctggcttcatcggttatgcggtaatgaacctcgcggtaaacttctggttgaccaataaaggcattctgccaaccacggatgccgcggttctgaaagccaataacatccagagcattcttgggatccagagcatcgataccgggatcctcggtgcggtgatcgccggtattatcgtctggatgctgcatgagcgtttccataatatccgcctgccggatgcgctggcattcttcggcggtacgcgcttcgtaccaattatctccagcctggtgatgggccttgtcggcctggtgattccattagtctggccgattttcgccatgggtattagcggcttgggccatatgataaacagcgcgggtgatttcggaccgatgctgtttggtaccggtgaacgtctgctgttgccgtttggtctgcatcacattctggtggcattaattcgctttaccgacgcaggcggcacgcaggaagtctgcggtcaaaccgtcagcggcgcactgaccatcttccaggcgcaattgagttgcccgaccactcacggtttttctgaaagcgccacgcgtttccttagccaaggtaaaatgcctgcgtttctcggcggtctgccaggtgcagcgttagctatgtatcactgcgcgcgcccggaaaatcgccataaaattaaaggtctgctgatttctggcctgatcgcctgcgtcgttggcggcactaccgaaccgctggaattcctgttcctgttcgtagcgccagttctgtatgtcatccacgcgctgttaaccggcctcggcttcaccgtcatgtctgtgctcggcgtcaccatcggtaataccgacggcaatatcatcgacttcgtggtgttcggtattttgcatggtctgagtaccaagtggtacatggtgccagtggtggcggcaatctggtttgtcgtttactacgtcatcttccgtttcgctatcacccgcttcaatctgaaaaccccggggcgcgatagcgaagttgccagcagtatcgaaaaagccgttgccggtgcgccgggtaaaagtggttacaacgttcctgcaatcctcgaagcattaggcggtgccgacaatattgtcagcctcgataactgcattacccgtctgcgtttgtctgtgaaagatatgagccttgttaatgtgcaggcactgaaggacaatcgggcaattggcgtagtacaacttaatcaacataacctgcaggttgttatcgggccacaagttcagagtgtaaaagatgaaatggccggtctgatgcatactgtccaggcataaggataagatatgttcgattttagtaaggtcgtggatcgtcatggcacatggtgtacacagtgggattatgtcgctgaccgtttcggcactgctgacctgttaccgttcacgattagtgacatggattttgccactgccccctgcattatcgaggcgctgaatcagcgcctgatgcacggcgtatttggctacagccgctggaaaaacgatgagtttctcgcggctattgcccactggttttccacccagcattacaccgccatcgattctcagacggtggtgtatggcccttctgtcatctatatggttagtaaactgattcgtcagtggtctgaaacaggtgaaggcgtggtgatccacacacccgcctatgacgcattttacaaggccattgaaggtaaccagcgcacagtaatgcccgttgctttagagaagcaggctgatggttggttttgcgatatgggcaagttggaagccgtgttggcgaaaccagaatgtaaaattatgctcctgtgtagcccacagaatcctaccgggaaagtgtggacgtgcgatgagctggagatcatggctgacctgtgcgagcgtcatggtgtgcgggttatttccgatgaaatccatatggatatggtttggggcgagcagccgcatattccctggagtaatgtggctcgcggagactgggcgttgctaacgagcggcagcaaaagtttcaatattcccgccctgaccggtgcttacgggattatagaaaatagcagtagccgcgatgcctatttaagcgcactgaaaggccgtgatgggctttcttcccctagcgtactggcgttaactgcccatatcgccgcctatcagcaaggcgcgccgtggctggatgccttacgcatctatctgaaagataacctgacgtatatcgcagataaaatgaacgccgcgtttcctgaactcaactggcagatcccacaatccacttatctggcatggcttgatttacgtccgttgaatattgacgacaacgcgttgcaaaaagcacttatcgaacaagaaaaagtcgcgatcatgccggggtatacctacggtgaagaaggtcgtggttttgtccgtctcaatgccggctgcccacgtagcaaactggaaaaaggtgtggctggattaattaacgccatccgcgctgttcgttaaccccaattgcgcaacgtaaaaaatcgttgcgcaatcgtggatttttaccctgctttgtttttataatggtgcgcacttttatatccagaaaaagagtgcgaccatgattgataccaccctgccattaactgatatccatcgccaccttgatggcaacattcgtccccagaccattcttgaacttggccgccagtataatatcagccttcctgcacaatccctggaaacactgattccccacgttcaggtcattgccaacgaacccgatctggtgagctttctgaccaaacttgactggggcgttaaagttctcgcctctcttgatgcctgtcgccgcgtggcatttgaaaacattgaagatgcagcccgtcacggcctgcactatgtcgagctgcgttttagtccaggctacatggcaatggcacatcagctgcctgtagcgggtgttgtcgaagcggtgatcgatggcgtacgtgaaggttgccgcacctttggtgtgcaggcgaagcttatcggcattatgagccggaccttcggcgaagccgcctgtcagcaagagctggaggcctttttagcccaccgtgaccagattaccgcacttgatttagccggtgatgaacttggtttcccgggaagtctgttcctttctcacttcaaccgcgcgcgtgatgcgggctggcatattaccgtccatgcaggcgaagctgccgggccggaaagcatctggcaggcgattcgtgaactgggtgcggagcgtattggacatggcgtaaaagccattgaagatcgggcgctgatggattttctcgccgagcaacaaattggtattgaatcctgtctgacctccaatattcagaccagcaccgtagcagagctggctgcacatccgctgaaaacgttccttgagcatggcattcgtgccagcattaacactgacgatcccggcgtacagggagtggatatcattcacgaatataccgttgccgcgccagctgctgggttatcccgcgagcaaatccgccaggcacagattaatggtctggaaatggctttcctcagcgctgaggaaaaacgcgcactgcgagaaaaagtcgccgcgaagtaacaaaatggatggtgcaaatgcaccatccatttttcatgcaaggcacaaagtcgcgcgatgtttggcggattcgatgcccagctcaatcaactccattacctggattgcctggcttgccggaaccggattttcaccatcgccatttaacgcatcacgaatagccgcatagtaagccggataattcccaggcaccgtcaacagcgtttcttcgacacgttcctcaccttccacgcgggtaagtacgccatcacgcatatcgtagccccagtcttcctgcggtagacgctcgccatttttcagacgttcttcctgtggatcgaggccatatttcacataactgcctcgggatccatgcacgatataccgtgcactctcagcggctgccagcatggtaccgtgtaaaatgactcgccgctgtggataggacaagatggcgtggaaataatcggtgctctgcgctccgggccgtaactgtgccaaatctaccgtcatgctgaccggtaaaccaaaaagcgtaatggcctgatcaagaagatgtggtgctaaatcgtaccagataccgctgcctgggccgccctgttcacgccaacgatcgcgcacctgcggacggaagcggtcaaaatgagactcaaagtaagcaacttcacccagcacgccttccgcgagtaaaccttttagcgtcaagaaatcgctatcccagcgacggttatggaatacagacagcacacgccccaggctttttgccagcgcatccagctctcgcgcttgactcagtgtcacggtaaagggtttatcaacgaccacatgtttacccgcctcaagcgccgctttggctaacgggaaatgggtatcgttgggtgtaggaatgacaatcaggtctatgttgggatcgttaaacagatgcttcggctcagagacaaccgtaaccgttggccagtcggcttttacttttgtttcatcactgctggagattaccgccagttcctgcccgggcgtgcccgcaatcaggggcgcatggaaggttttgctcgcataaccatacccaatcaacccaacacggatgttgtcgctcatgtcattgcctctcattgaagtatgatggctatttgacactatcctttacccacgctcaacagtttaataacctgccagcaataagggatgttgtttaacttaagtcaaaaaaatagcgaattttccaacgacaaaagctaaatatcgcaaaaacctcagtaaaaatcttgctggagctattattgctaagtaacatttaccccctgaagttaatggatcaatcaagagagatgtgggctgtaatgaatcgtcttattgaattaacaggttggatcgttcttgtcgttagtgtcattcttcttggcgtggcgagtcacattgacaactatcagccacctgaacagagtgctagcgtacaacacaagtaagctctgcacttgtggagcgacatgctgcccgtccgggtgcatgttttcacttgtcggatattaaaccaggaatttattatcttgttcgatgttgttggtgattgtcagggatagtaaagcgcgttactcttttcagagcagtttttcatccctgaatatttgccatcagcgcattcttattattgtaataacacaagcgttcacttttggtgaaattttatcatcactaataatacctacccctttggtattaattattttatggaccttttatgactgttcaggactacttattaaaatttcgcaaaatcagtagtctcgaaagtctggaaaaactctacgaccatcttaattacaccctgacggacgatcaggaactgatcaatatgtatcgtgctgccgatcaccgtcgcgcagagctggtttctggcgggcgtttgtttgacctcggccaggtaccgaagtccgtctggcactatgtccaataaagaaagtagcgatcggttataaaagccttataataacgcccctaaaattagatttgcctgtttgcgtcgctattctggagaacctatgaccaccacaacgccacaacgtattggaggctggttgcttggcccgttggcctggcttttagtcgctctgttgagtacgacgctggcgttgttgctgtataccgctgcgttatcttctccgcaaacatttcaaacgctcggcggacaagcactgacgacacaaatcttatggggcgtttcttttattaccgctatcgccttgtggtattacacactgtggttgaccatcgctttctttaaacgtcggcgttgtgttcctaaacactatattatctggctgcttatttccgtattgctggcagtaaaagcattcgcttttagtcccgtggaagatggcatagccgttcgccagttgctgtttactttgttggcaaccgcattgatcgtcccctatttcaaacgcagcagccgggtaaaagcgacgtttgtgaatccgtaataaccttacagttaacctgttgtcgcctgctctggattaacggataataggcggcttttttatttcaggccgaaaaatgactgactacctgttactgtttgtcggaactgtactggtcaataactttgtactggtcaagtttctcggtctctgtccgtttatgggggtttccaaaaaactggaaaccgcgatgggcatggggctggcaacaacgtttgtgatgacgctggcgtctatttgcgcctggcttatcgatacgtggattttgatcccacttaatctgatttacctgcgcaccctggcatttattctggtgattgctgtggtcgtgcagttcaccgagatggtggtgcgcaaaaccagcccggtgctttaccgtctgctggggatttttttgccgcttatcaccaccaactgtgcagtgctcggcgtggcgttgctgaatatcaatctcgggcacaatttcttgcagagcgcgctgtacggtttttccgccgctgtcggtttcagcctggtgatggtgctcttcgccgccatccgcgaacgccttgctgtggctgatgtcccggcaccttttcgcggtaatgccattgcgttaattaccgcaggtcttatgtctctggcctttatgggctttagtggtttggtgaagttgtaatgaatgctatctggattgccgttgccgccgtgagcctgctgggcctggcgtttggcgccattctgggttatgcctcccgccgttttgcggtggaagacgatccggtcgttgagaaaattgacgaaatcttaccgcagagccagtgtggtcagtgcggttatcccggctgtcgcccctacgcggaagccatcagctgtaacggtgaaaaaatcaaccgttgcgccccaggtggcgaagctgtgatgctaaaaattgccgagttgcttaatgtcgagccgcagccgctggatggcgaagcgcaagagataacgcctgcgcggatggtggcggttattgatgaaaataactgtattggctgcactaaatgtattcaggcgtgtccggtagacgccatcgttggcgctacccgtgccatgcatacggtaatgagtgatctctgtacgggctgcaatttatgtgttgatccgtgcccgacgcactgcatcagcttgcaaccggtcgcagaaacacctgactcctggaaatgggatctgaacaccattcccgtgcgtatcattcccgtggaacaccatgcttaagttattctctgcattcagaaaaaataaaatctgggatttcaacggcggcatccatccaccggagatgaaaacccagtccaacggtacacccctgcgccaggtacccctggcgcagcgttttgttattccactgaaacagcatattggcgctgaaggtgagttgtgcgttagcgtcggcgataaagtattgcgcggccagccgcttacccgtggtcgcggcaaaatgctgcctgttcacgcgcccaccagcggtaccgttacggctattgcgccccactctacggctcatcctagtgctttagctgaattaagcgtgattattgatgccgatggtgaagactgctggatcccgcgcgacggctgggccgattatcgcactcgcagtcgcgaagagttaatcgagcgcatacatcagtttggtgttgccgggctgggcggtgcaggattcccgacaggcgttaaattgcagggtggcggagataagattgaaacgttgattatcaacgcggctgagtgcgagccgtacattaccgccgatgaccgtttgatgcaggattgcgcggctcaggtcgtagagggtattcgcattcttgcgcatattctgcagccacgcgaaattcttatcggcattgaagataacaaaccgcaggcgatttccatgctgcgcgcggtgctggcggactctaacgatatttctctgcgggtgattccaaccaaatatccttctggcggtgctaaacaattaacctacattctgaccgggaagcaggttccacatggcgggcgtagttccgatatcggcgtattaatgcaaaacgtcggcactgcttatgcagtgaaacgtgccgttattgatggcgagccgattaccgagcgtgttgtaaccctgactggcgaagcaatcgctcgcccgggcaacgtctgggcacggctggggacgccagtgcgtcatttattgaatgatgccggattctgcccctctgccgatcaaatggtgattatgggtggcccgctaatgggctttaccttgccatggctggatgtcccggtcgtaaagattaccaactgtctgttggctccctctgccaatgaacttggcgaaccacaggaagaacaaagctgcatccggtgtagcgcctgtgctgacgcctgccctgcggatcttttgccgcaacagttgtactggttcagcaaaggtcagcaacacgataaagctaccacgcataacattgctgattgcattgaatgtggggcttgcgcgtgggtttgcccgagcaatattcccctggtgcaatatttccgtcaggaaaaagctgaaattgcggctattcgtcaggaagaaaagcgcgccgcagaagccaaagcgcgtttcgaagcgcgccaggctcgtctggagcgcgaaaaagcggctcgccttgaacgacataagagcgcagccgttcaacctgcagccaaagataaagatgcgattgctgccgctctggcgcgggtgaaagagaaacaggcccaggctacacagcctattgtgattaaagcgggcgaacgcccggataacagtgcaattattgcagcacgggaagcccgtaaagcgcaagccagagcgaaacaggcagaactgcagcaaactaacgacgcagcaaccgttgctgatccacgtaaaactgccgttgaagcagctatcgcccgcgccaaagcgcgcaagctggaacagcaacaggctaatgcggaaccagaacaacaggtcgatccgcgcaaagccgccgtcgaagccgctattgcccgtgccaaagcgcgcaagctggaacagcaacaggctaatgcggaaccagaagaacaggtcgatccgcgcaaagccgccgtcgaagccgctattgcccgtgccaaagcacgcaagctggaacagcaacaggctaatgccgagccagaacaacaggtcgatccgcgcaaagccgccgtcgaagccgctattgcccgagccaaagcgcgcaaacgggaacagcaaccggctaatgcggagccagaagaacaggttgatccgcgcaaagctgccgtcgaagcggctattgcacgcgccaaagcacgcaagctggaacagcaacaggctaatgcggtaccagaagaacaggttgatccgcgcaaagcggcagttgccgcggctattgcccgcgctcaggccaaaaaagccgcccagcagaaggttgtaaacgaggactaaatggtattcagaatagctagctccccttatacccataaccagcgccagacaagccgcattatgctgttggtgttgctcgcagccgtgccaggaatcgcagcgcaactgtggttttttggttggggtactctcgttcagatcctgttggcaagcgttagtgctctgttagccgaagctctcgtactcaaactacgcaagcagagcgtagccgcagcgttgaaagataacagtgcattgctgacaggcttattgctggcggtaagtattccccccctcgcgccatggtggatggtcgtgctgggtacggtgtttgcggtgatcatcgctaaacagttgtatggcggtctgggacaaaacccgtttaatccggcaatgattggttatgtggtcttactgatctccttccccgtgcagatgaccagctggttaccgccacatgaaattgcggtcaacatccctggttttatcgacgccatccaggttatttttagcggtcataccgccagtggtggtgatatgaacacactacgcttaggtattgatggcattagtcaggcgacaccgctggatacatttaaaacctctgtccgtgccggtcatagcgttgaacagattatgcaatatccgatctacagcggtattctggcgggcgctggttggcaatgggtaaatctcgcctggctggctggcggcgtatggttgctatggcagaaagcgattcgctggcatattcccctcagcttcttagtaacgctggcgttatgcgcaatgttgggctggttgttcagtccagaaacactggcagcaccgcaaattcatctgctgtctggagcgaccatgctcggcgcattctttattttgactgacccggttaccgcttctacgaccaatcgtggtcgtcttattttcggcgcgcttgcgggcttattagtctggttgatccgcagtttcggcggctatcctgacggcgtggcttttgccgtcctgctggcgaacatcacggttcctctgatcgattactacacgcgtccgcgcgtctacggccatcgcaaagggtaaaccatgctgaaaactatccgaaaacacggcattacgttggcgctatttgcagcgggtagtacagggttaactgcggccatcaaccagatgaccaaaacgacgattgctgaacaggccagtctgcaacaaaaggcgttatttgatcaggtgctgccagccgaacgctataacaatgcgctggcacagagttgctatctggtaactgcgccagagttaggtaaaggtgagcatcgggtttacatcgccaaacaggatgacaaaccggcagccgccgttctggaagcaaccgcgccagatggctattccggtgcgattcagctgctggtgggagccgattttaacggcacggtacttggcacgcgcgtgacagagcaccacgaaacgccagggcttggcgataaaatcgaactgcgcctttctgactggatcacccattttgcgggtaaaaaaatcagtggtgcagatgatgcgcactgggcggtgaagaaagatggtggtgatttcgaccagttcaccggcgcgacgattactccccgcgcggtggttaatgcggtaaaacgcgccggattgtacgctcagacgttaccggcacaactttctcaacttcctgcctgtggagaataaagcgtgagcgaaattaaagacgttattgttcaggggttgtggaaaaacaactctgcgctggtccagttgctcggcctttgtcctctgttggcggtcacgtccactgccactaacgctctgggtttaggacttgcgactacgctggtactgacgctgaccaacctgaccattagcacgctgcgtcactggacgccagccgagatccgcattcccatttacgtgatgatcatcgccagcgtggtcagcgctgtacagatgctgatcaacgcctacgcctttggcctgtatcaaagtttagggatttttattccgctgattgtcactaactgtatcgttgtgggccgcgctgaagccttcgccgccaaaaaaggtccggcgcttagcgcactggacggctttagtattggtatgggcgcaacctgcgccatgttcgtgctgggtagtctacgcgaaattatcggcaatggcacattgtttgacggtgcagatgcgctgttaggtagctgggcaaaagtattacgcgtggagattttccacaccgactcccctttcctgctggcgatgctgccaccaggtgcatttattggcctgggactgatgctggcaggaaaatacctgattgatgaaagaatgaaaaagcgccgtgctgaagcagctgcagaacgtgcattgccaaacggtgaaacagggaatgtctgatgaataaagcaaaacgcctggagatcctcactcgcctgcgtgagaacaatcctcatcccaccaccgagcttaatttcagtagcccttttgaattgctgattgccgtactgctttccgctcaggcgaccgatgtcagtgttaataaggcgacggcgaaactctacccggtggcgaatacgcctgcagcgatgcttgaactgggcgttgaaggggtgaaaacctatatcaaaacgattgggctttataacagcaaagcagaaaatatcatcaaaacctgccgtatcttgctggagcagcataatggcgaggttccggaagatcgtgctgcgcttgaagccctgcccggcgtaggtcgtaaaacagccaacgtcgtattaaacactgcattcggctggccgactattgctgtcgacacgcacattttccgcgtttgtaatcgtactcaatttgcgccggggaaaaacgtcgaacaggtagaagaaaagctactgaaagtggttccagcagagtttaaagtcgactgccaccattggttgatcctgcacgggcgttatacctgcattgcccgcaagccccgctgtggctcttgtattattgaagatctttgtgaatacaaagagaaagttgacatctgaagaaaaggggtaacaccgattaccccattgataacctttctttatcctcttttaaaacatctttttaacgtcaatgatgccattgcttagcgttatcatcaggtaatccgtttgcggataaccaaaaatgcaggttaattgtttttttaatagcgaaattttctattcattcgtgatcaagatcacgatgctgtcgcaatgtaaaaacattgcaagaatcaggttaaatcatttaaatttacacacgcaacaaatattgacctacaaaacattacactggctatttttcagaaactggactatctcactagtaaaaacgctaaatagcagaacatatcgccgttaagccatcacccccctctcagtgcagtgaaaaaatctgccgttacgttttttgaaaaatttaacgctggataacatttcccggaatggttgaattccccgcctcagttatatgtaacagattattacaaaggacttgtctgaaagtgcaagatagtgaacattacctgccgtttcccctcccactataacaattgcgcgtatgttttttatacataacgcgagaaagcacccccgttaatatgggatgtaaaaaaagaggtaaaagtgtccactgcaaaccaaaaaccaactgaaagcgtcagtttgaacgctttcaaacaaccgaaggcgttctatctcatcttcagcattgagttatgggaacgttttggttattacggcctacaaggaattatggctgtttacctggttaaacaactgggtatgtctgaagcggatagtatcacccttttctcttcctttagtgccctggtttatggtctggtcgctatcggcggctggttaggtgacaaggtactgggtactaaacgcgtaattatgctcggcgctattgtgctggcgattggttatgctctggttgcctggtctggtcacgacgccggtatcgtttatatgggtatggcggctattgcggtcggtaacggcctgtttaaagctaacccgtcttctctgctttctacatgctatgagaaaaacgacccgcgtctggacggtgcattcaccatgtactacatgtccgtcaacatcggctctttcttctctatgattgctacgccgtggctggccgcgaaatacggctggagtgttgcgtttgcgttgagcgttgtaggcctgctgatcactatcgttaacttcgccttctgccaacgctgggttaaacagtacggtagtaaaccagacttcgagcctatcaactaccgtaacctgctgctgaccattattggtgttgtggcactgatcgctatcgccacctggctgctgcacaatcaggaagttgcgcgtatggcgctgggcgttgttgccttcggtatcgtggttatcttcggtaaagaagccttcgcgatgaaaggtgctgcgcgtcgtaaaatgatcgttgccttcatcctgatgctcgaagccattatcttcttcgtgctgtacagccagatgccaacgagtctgaacttctttgcgattcgtaacgttgagcactccattctgggtctggccgtagaacctgagcagtatcaggcactgaacccgttctggatcatcatcggtagtccgattctggccgctatctataacaagatgggcgataccctgccgatgccaaccaagtttgcaatcggcatggtgatgtgttctggtgcgttcctgattctgccgctgggtgcgaaattcgcgtctgacgctggtatcgtgtctgtaagctggctggtcgcaagctatggcctgcagagcatcggggaactgatgatctctggtctgggtctggcaatggttgctcaactcgttccgcagcgtctgatgggcttcattatgggtagctggttcctgaccactgccggtgcaaacctgattggtggttatgttgcgggtatgatggctgtgccggataacgttaccgatccgctgatgagtctggaagtctatggtcgcgtattcttgcagattggtgtcgctactgccgttattgcagtactgatgctgctgaccgcgccgaaactgcaccgcatgacgcaggatgacgctgcagacaaagcggcgaaagcagccgtagcgtaaaattcagggaaactcttttacaagccgctaacttttcgttagcggctttttttttgttcagcaacgcactaccatactttaaaccacagacaaaaggagttaccgatgaaattgttctacaaaccgggtgcctgctctctcgcttcccatatcaccctgcgtgagagcggaaaggattttaccctcgtcagtgtggatttaatgaaaaaacgtctcgaaaacggtgacgattactttgccgttaaccctaaggggcaggtgcctgcattgctgctggatgacggtactttgctgacggaaggcgtagcgattatgcagtatcttgccgacagcgtccccgaccgccagttgctggcaccggtaaacagtatttcccgctataaaaccatcgaatggctgaattacatcgccaccgagctgcataaaggtttcacacctctgtttcgccctgatacaccggaagagtacaaaccgacagttcgcgcgcagctggagaagaagctgcaatatgtgaacgaggcactgaaggatgagcactggatctgcgggcaaagatttacaattgctgatgcctatctgtttacggttctgcgctgggcatacgcggtgaaactgaatctggaagggttagagcacattgcagcatttatgcaacgtatggctgaacgtccggaagtacaagacgcgctgagtgcggaaggcttaaagtaatagccatcggcccacaggtcgttgtgggccgaaatgagatatttcagagctttgttgcgctgaagtaatgttctggtttggcaatacgatcctgagcagccaccacttgcagctcatattcctgcattgctttggtggtcaccatgatttcgtagactgcagcggtcacatgttccagcgcctcctgcagcgttgccccctgaagcagtttcaccagcagtaaaccgctcgtcacatcaccaacacctaccggctggcgcataccaaaatccaccagcggacggctgatatgccaggcttcatcggcggtgaccagcagcatttcaaaacggtcacggctgtagccagctcgcgccaggtgtttaaccaacacaatttgtggcccttgcgcaatgagttcgcgcgctgccagaaccgcttcttcgacgttatttaccgcatgctcacagagtatttccagctcaaccagatttggcgcaatgatatcgctggcaggcaaaccgtgccgcacatgaaactctgcgacacccggtgcaacgatacagcctttttccggatgacccattaccggatcgcaaaaatatttcgcctgcggattcgcggctttcacctgacggacgataccgaggatatgttcaccctgctccgcgcttcccagatagccacttaatacggcatcacaggtgtgtaatttatcaatggcggcaatgccttgcacaatttcggttaaatggctgggcggcatcacgcagccagtccatttgccgtattgggtgtgattagaaaattgaacggtgttcagcggccagacgttcgcgcccaggcggcgcatcggaaactctgccgcactgttacccgcatgaccataaacaacgtgagactggatagcgagaatatttttcatcatgttccctgtataaaaaccagggggagtgatttctcactccccctttccacttaatgcattatttccagcaaatcagacagtaattctttttaccgcgacgcagtaaggtaaaacgaccaaacagacgatcttcttctttaaagaagtattcaggatcggactgtttttcaccgttaatggtgatggcattggaggcgatagttttacgtgcctgaccacgggaaggttgcagttcagaatcgaccagtgcctgcatcaggtctgcgcccttttccatctcaaccatcggtacgccgtcctgcgccagctgttcgaagtccgcttcactcagcgcactcaaagaaccgctgaacaggcattcggtaatacgttttgccgcctgtaaaccttcttcaccgtgaaccagacgagtcacctgctccgccagtacatactgggcgcgcggtgctttaccgctgtttttatcttcttcttccagggcgttgatctcttcaatgctcataaaggtgaagaacttcaggaagcggtaaacgtcggcatccgcagtgttgatccagaactggtagaatttgtacgggctggttttcttcggatccaaccagactgcgccgccttcagttttaccaaatttggtgccatctgctttagtgatcagcggaacggtcaggccaaacacctgattctgatgcagacgacgggtcaggtcgataccagaagtgatgttaccccactggtcagaaccaccaatttgcagcaccacaccgtactgtttgttcagacaggcgaagtcataaccctgcaacaggttgtaggaaaactcagtgaagctaatcccctgatcttcacggttgagacgctgcttaaccgcttctttgttgatcatctggttaacggagaagtgtttgccaatatcgcgcaggaaggtcagcacattcatattgccgaaccagtcatagttgttcgccgcgatagcagagttttctccacagtcgaaatcgaggaacggggcaacctgcttacggattttgtccacccactcctgaacagtttcttcggtgttcagcttacgctcggcagctttgaagctcgggtcgccaatcagacccgtcgcgccgcctaccagcgcaaccggcttgtggcccgcctgctggaagcgtttcaggcataacaatggaacaagatgccccaaatgcaagctgtcagcggtaggatcgaagccgcaatagagcgcgatcgggccttgcgccagtcgctctgctaacgcttcctcgtccgtcacctgggctaccagcccccgctcttgcaattgtttaatcaagttactgcttgccatcaaaatctccatgtatataacgactgcacctttgccggtacacgacttttcgccagatgcgaaagagacatagaataaagtgccagaatcaggagtaccagcgattaaagcaagatttttgcatcttttcagggtgcaagacgatcaatcttccacgcatcattttcacgctggtacaaaaagcggtcatgcaggcgatgctcaccaccctgccagaactcaatctgttcaaggctgacgcgaaaaccgccccaaaagctcggcaatggcacttcgccctgttgaaacttctgcttcagctccaggaatttactttcaaggataccgcgggcagaaatgcgactggactgcttgctaacccatgcaccaatctggctatcacgcgggcggctatgaaaatatttcatcacttcgagagtgctaagtcgttctgctttaccgatcaccatcacctggcgctcaagggtatgccacgggaacagcaggctaacgcgcggattattttcgatttgatgtgctttacggctgccgaggttggtgtaaaacaccatgcctttttcgtcgtaatgtttgagtaaaacgatgcgctgataaggctgaccatgttcatccacggtagcgaccaccatcgcggtagggtccgccagtttggcttcacaagcctgagagagccaacgttcaaaaagggttaatggatcggcgggaagatcgcggcggcgtaacccgcctttggtgtattcacggcgcagatgcgcgatttgctgcaattcgtcgttatcagacatggttttctttacggattgtcagtgggtgacgctattgtgcgccgcccctggaaaaatctcaacgctgtggattttgtaactgacagttattcaagacgatgcggtcgcgtttatagacagtcgcttcatcgcctttgctccagaaaacatagattccgtcagtgtaacgcgcgccagaggcactaatgccctgtttgagatgcagtagttgattatcgtaaacaaaactgacctcctggcgcggattattcagtttgaccgtcaacggtttttcatcacactggtattccagcgtatcggtttgcatgcgctcaaccagctgattaaaggcgctacagccggagagaaggaccggcaaaatgataattaacagttttttcatagtcatatcccgaagactttcctggtctggagggcaatacgccctccctaacgttccaagtgtaacggcagacgcggtaagaaaaattcagttaactctgatatcacgggttagcggggaaaatagcccccagtaccgtctcctggcttgcgccagtgacggaaggcagatttcctggtaatcccgccagcgtccgccaggcaagccaggcgaaagccaatgcttccatgtcatcgccactaatgccaacggcatcggtggtggtgacttctgtgcctggcagtaatgccgccagacgcgccatgagtagcggattacgactacctccaccacataccatcaatcgttcgcagccaccgctcaacaaaacttgttcagaaatggtcacggcggtgagttctgccagtgtcgcctgcacatctcggggatcaacacccggaaaatggcgcaaatggcgctccagccaaccatagttaaagtattcgcgtccggtgcttttcggtgcaggttggctgaaatacgggtcgctgagcatattttgcagcagtgggagaataactttacccgcccgtgcccactcggcatctttatcgtaaggtttaccggcctgacgccagatccaggcatccatcagcatgttaccaggaccggtatcgtagcccccaaccggctgcccaggaatgagcagactcagattggcgatgccgccaatattgagcaccattcgtcgctcggttgggtgagccagcagcgcatgatggaacgcaggtaccagcggtgcgccttgtcctcccaaggcaatatcgcgacggcgaaaatcaccgacaaccgtaattccggtgcgtgccacaatttgattgttatcgccaatctgtaaagtgtgtggtgccacgcccgtcggttcatgccagacggtttgaccgtgacaaccgatcgcaactatatctcttgcctgcagattttgttccttaagcaaggcattgaccgcatcagcaaaaagttgcccgagttgagtatcaagctgtccaaactggctaagtgtaagctgctggccctggcaaatatccagtacagcctgtttcagagataccgggatcggccaactcaaacttgccagctgtgcgacccggtgttcatcaattgtcgccaacacaacatcaacaccatcaaggctggtgccactcataacgccaataaagcggccgcttttcatagttcatcctttttcaatctgacgtttgcgcaccactcaaacataaacttttcgtgaataccatgcggaatgaccgatttttaccgttggtagtaaaacattatcttcaaatcaataatcatcatgaatgttttgtttataattggttgatcctactttcattatgatttgctcatatttggtagaacatgtaaccatggattcacatatgccatatactttgaccatgagggatgcttgcgtggcgtttcatggtgaacaggagatttttcaatgattaaacgcgtattggttgttagtatggtaggtctgtctcttgtcggttgtgttaataacgacaccctgagtggggatgtttataccgcttctgaagcgaaacaagtacagaatgtcagctatggcaccatcgttaacgtacgtccggtacagattcagggcggtgatgattccaacgttatcggtgcaattggcggtgctgttcttggtggtttcctggggaatactgttggtggcggaaccgggcgttctctggctactgcagcaggcgctgttgcaggtggcgtagctggtcagggcgtacagagtgcaatgaacaaaacgcagggtgtcgagctggaaattcgtaaagacgatggtaataccatcatggtggtacagaaacaaggcaacactcgtttctctccgggccaacgtgtcgtactggccagcaatggcagtcaggtgaccgtttctccgcgctaaataagtttgcgtgtggtcaggttactgaccacacgcccccttcatttcaccctttggcctgtaactcaatgatattatgctcaagttttgcgatgagcgtaatcagttgctccagttcctctgcggagatgccatgtaatatttccgcgcgggttttgttaataacagcttccatttcgctgatcagcggctctgccttttccgtcagtttaatacgtttagcccgacgatcgctggcacaagtttgacggctaattaaccctttttcttccagttggtccagagtacggaccagacttggctgctcgatgccaatcgcttttgccagttgaatttggctctggtctggaggtaactgatggatattgtgtaacgtaacccaatgggtttgtgttaactccagcggtttcaggcgatggtctatcagagcacgccatatgcgcaccaaccgtgccagatcagaacctagtgggctttccaatttcatctccttataattagcttgctaagatattatgcggcttttagaatagtgtgcagcaattgtattgctaaaacaaatgtattgctgcatttggttaccgtcagacatatttttcagaaattgcgcgtaaatttttcgcacttaaagaatatttattaatctaacgcaatatattcggtcgtaaaggaatctactttgtgaagtttatgctcaatgcaacaggattgcccttacaagatctggtgttcggtgcgtccgtctactttcctccgtttttcaaagcattcgcgtttggattcgtcatctggcttgtcgtacaccgcctgcttcgtggctggatctacgccggtgacatctggcatcccttgttaatggatttaagcctgtttgcgatttgcgtttgccttgctctggcaatactgattgcgtggtaactatgagtattaaaacaattaagtatttcagtacaatcattgtagcggtagttgcggttcttgccggatggtggctgtggaattattacatgcaatctccgtggacacgcgacgggaaaatacgcgcagaacaggtttctatcaccccacaggtgagcggacgtattgttgagctgaatataaaagacaaccagctggttaacgcgggggatcttctgctcacgatcgataaaacgccctttcagatcgccgagctgaacgcacaggctcagctggcgaaagcgcaatctgacctcgcaaaagccaataacgaagcgaatcgtcgtcgtcatctcagtcaaaattttatttctgccgaagaactcgataccgctaacctcaatgttaaagcgatgcaggccagtgttgatgccgcacaggcgacgctgaaacaggcacaatggcaactggcgcaaacggaaattcgcgccccggtgagtggatgggtgactaaccttactacccgcatcggcgattacgctgataccgggaaaccgctgtttgcccttgtcgacagccacagcttttacgtcattggttattttgaagaaaccaagttgcgccatatccgcgaaggtgcaccagcacaaattaccctctatagtgataacaaaacgttacagggtcacgtttccagtatcggtcgggcgatttatgatcagagcgttgaaagtgacagtagccttattccggatgttaaacctaacgtcccctgggttcgactcgcccaacgcgttcccgtccgctttgcgctggataaagtcccaggcgatgtcacgttggtgagcggcaccacctgtagcattgccgtaggtcaataatgaacgcaagcagttggtccttgcgcaatttgccctggttcagggccacgctggcgcaatggcgttatgcgttacgcaataccattgccatgtgtctggcgctgacggttgcctattatttaaatctggatgaaccctattgggcgatgaccagcgctgcagtggttagctttcccaccgttggcggtgttatcagcaaaagcctcggacgcatcgctggcagtttgctcggagccattgcggcactgcttcttgccgggcatacgctcaatgagccgtggttttttctattgagcatgagcgcgtggcttggcttttgtacctgggcctgtgcgcacttcacgaataacgtcgcgtatgcatttcaactggcgggctacacggctgccatcatcgcctttccgatggttaatattactgaggccagccagctgtgggatatcgctcaggcgcgcgtttgcgaggtaatagtcggtattttgtgcggcggcatgatgatgatgatcctgccgagcagttccgatgctactgcccttttaaccgcattgaaaaacatgcacgcccgattactggaacatgccagtttactctggcagcctgaaacaaccgatgccattcgtgcagcacatgaaggggtgattgggcagatactgaccatgaatttgctgcgtatccaggctttctggagccactatcgttttcgccagcaaaacgcgcgccttaatgcgctgctccaccagcaattacgtatgaccagtgtcatctccagcctgcgacgtatgttgctcaactggcccagtccgccaggtgccacacgagaaattctcgaacagttgctgacggcgctcgccagtagccaaacagatgtttacaccgtcgcacgtattatcgccccgctacgcccgaccaacgtcgccgactatcggcacgtcgccttctggcagcgactacgttatttttgccgcctttatctgcaaagtagtcaggaattacatcgtctgcaaagcggtgtagatgatcataccagactcccacggacatccggcctggctcgtcataccgataacgccgaagctatgtggagcgggctgcgtacattttgtacgttgatgatgattggcgcatggagtattgctagccaatgggatgccggtgccaatgcattaacgctggcagcaattagctgcgtactctactccgccgtcgcagcaccgtttaagagcttgagtcttctgatgcgcacgctggtgttacttagcctattcagctttgtggtcaaatttggtctgatggtccagattagcgatctgtggcaatttttactgtttctctttccactgctggcgacaatgcagcttcttaaattgcagatgccaaaatttgccgcattgtgggggcaactgattgtttttatgggttcttttatcgctgtcactaatcccccggtgtatgattttgctgattttcttaacgataatctggcaaaaatcgttggcgtcgcgttggcgtggttagcgttcgccattctgcgtccaggaagcgatgctcgtaaaagccgccgccatattcgcgcgctgcgccgggattttgtcgatcagctaagccgccatccaacactgagtgaaagcgaatttgaaagcctcacttatcatcacgtcagtcagttgagtaacagccaggatgcgctggctcgccgttggttattacgctggggtgtagtgctgctgaactgttctcatgttgtctggcaattgcgcgactgggaaagccgttccgatccgttaagccgagtacgggataactgtattagtctgttgcggggagtgatgagtgagcgtggcgttcagcaaaaaagtctggcggccacacttgaagaattacagcggatttgcgacagccttgcccgtcatcatcaacctgccgcccgtgagctggcggcaattgtctggcggctgtactgcagccttagccaacttgagcaagcaccaccgcaaggtacgctggcctcttaattacttaattacaccacaggcatagcgttcaccgccaccgcccagcggtttaggttgatcggacatattatcgccgccaacgtggaccatcagcgctttgtctttgatttcatccagacttttcagacgaggcgcgatgacggcatcggtagctttgccgtcattattgacgaccagtgcaggcagatcgcctaaatgcccggcaccttctggcccttcatgtttaccggtattttgtggatcaagatgcccgcctgcggattccgcggcgctggctttgccatctttggtggctggctggcagcttcctttggcatgaatatggaagccatgttcaccggggggtaatgctttcagatcggggctaaactccagacctttatcggtttcagtaatggtgacgctaccaatactctgccctaccccttggctcgtgacgaggttcatctcgactttttcactggcagcttgtgcgccggttgcaacaaccagcgccagaatagccagactaaaacgtttcataggacctccgttcattgtgcattcctgaataagtgtaaaccagtgacacatttttgaacggcggctattcctaaaagtgcttacggtacgtcgtaccccagtgccgctttacggatacgaaaccattgttgacgggtcattttcagtgtttctgcttcgacagctgcccgtacgcgctcaattttaccactaccgataattggcagcggctggcttggtaaacgtaatacccaggcgtaaaccacctgttcaatgctgcccgcgtttaactcctctgccaccacagccagttcatcacgcagcggctggaaataatcatcattaaacagacgaccaccaccaaggcaggaccacgccatcggacgaacacgcagttgttgtagttggtcgagcgtgccatccagcagtaacggctgatgcaccggggatatttccacctgattagtggcaagggtaaacggcagacgactttgcaacagggcaaattgcgcaggcgtaaagttgcttacgccaaaatgacgcactttgccgctctgatgcagatgtttgaacgcgtccgccacttcatcggcatccattaacgggtctggtcggtggattaacagcaaatccagatgatcggtcgcgagattaattaggctctgttcggcgctcttaatgatgtgatcgcggtcagtgatgtaatgaccaatgacgttttcttcacgcgcggtcgtcgcgataccgcatttactgacgatttccatccgttcacgcaggtgaggtgccagtttcagtgcctcgccaaacgccgcttcgcactgatagccaccataaatatcagcatggtccacggtggtcacgccgagatccagatgctcttcaataaaactgaccagctggcgggcggacatattccagtccatcaatcgccagtagcccatcacaaaacgggaaaactccgggccttgcggcgcaatagtaatacgctgaaccataatcgcttcctcttatcagatatgagaggagtatacgcaagattaggttcaaaagagacttggttgctccggttcgtcactactcgctggcttatttgcgcgtaatttgcgcattaatcgctgccgacaaaggcgcagcacctcttgtttttcgccatcgctcattttattccagttaaaacgctcatcacgactacgaaaacagccgcgacaaaacccgcgttcgtcagactggcaaattccccggcacgggctctggacgggaaagaactctaattgctccgccacttcgccctcctcagataagattattaccattattgaagctgttaatgtccaaagtagcaactttgcttgcactagaccgactggtctactacactccaacgcatgaacaaacacaccgaacatgatactcgcgaacatctcctggcgacgggcgagcaactttgcctgcaacgtggattcaccgggatggggctaagcgaattactaaaaaccgctgaagtgccgaaagggtccttctatcactactttcgctctaaagaagcgtttggcgttgccatgcttgagcgtcattacgccgcatatcaccagcgactgactgagttgctgcaatccggcgaaggtaactaccgcgaccgcatactggcttattaccagcaaacactgaaccagttttgccaacatggaaccatcagtggttgcctgacagtaaaactctctgccgaagtgtgcgatctgagtgaagatatgcgcagcgcgatggataaaggtgctcgcggcgtgatcgccctgctctctcaggcgctggaaaatggccgtgagaaccattgtttaaccttttgtggcgaaccgctgcaacaggcacaagtgctttacgcactgtggcttggcgcgaatctgcaggccaaaattagccgcagtttcgagccactggaaaacgcgctggcccatgtaaaaaacattattgcgacgcctgccgtttaacaggcattttttatcaccagacgaccgggagcctttatgagttctgaaaaactgtattccccactgaaagtgggcgcgatcacggcggcaaaccgtatttttatggcaccgctgacgcgtctgcgcagtattgaaccgggtgacattcctaccccgttgatggcggaatactatcgccaacgtgccagtgccggtttgattattagtgaagccacgcaaatttctgcccaggcaaaaggatatgcaggtgcgcctggcatccatagtccggagcaaattgccgcatggaaaaaaatcaccgctggcgttcatgctgaaaatggtcatatggccgtgcagctgtggcacaccggacgcatttctcacgccagcctgcaacctggcggtcaggcaccggtagcgcctagtgcacttagcgcgggaacacgtacttctctgcgcgatgaaaatggtcaggcgatccgtgttgaaacatccatgccgcgtgcgcttgaactggaagagattccaggtatcgtcaatgatttccgtcaggccattgctaacgcgcgtgaagccggttttgatctggtagagctccactctgctcacggttatttgctgcatcagttcctttctccttctagtaaccatcgtaccgatcagtacggcggcagcgtggaaaatcgcgcacgtttggtactggaagtggtcgatgccgggattgaagaatggggtgccgatcgcattggcattcgcgttagtccaatcggtactttccagaacacagataacggcccgaatgaagaagccgatgcactgtatctgattgaacaactgggtaaacgcggcattgcttatctgcatatgagtgaaccagattgggcggggggtgaaccgtatactgatgcgttccgcgaaaaagtacgcgcccgtttccacggtccgattatcggcgcaggtgcatacacagtagaaaaagctgaaacgctgatcggcaaagggttaattgatgcggtggcatttggtcgtgactggattgcgaacccggatctggtcgcccgcttgcagcgcaaagctgagcttaacccacagcgtgccgaaagtttctacggtggcggcgcggaaggctataccgattacccgacgttgtaatccaacattgcgagcggcgtaaagccgccgctatactaaaacaacattttgaatctgttagccattttgaggataaaaagatgcgtcttcttcataccatgctgcgcgttggcgatttgcaacgctccatcgatttttataccaaagtgctgggcatgaaactgctgcgtaccagcgaaaacccggaatacaaatacagtctggcgtttgttggctacggcccggaaaccgaagaagcggtgattgaactgacctacaactggggcgtggataaatacgaactcggcactgcttatggtcacatcgcgcttagcgtagataacgccgctgaagcgtgcgaaaaaatccgtcaaaacgggggtaacgtgacccgtgaagcgggtccggtaaaaggcggtactacggttatcgcgtttgtggaagatccggacggttacaaaattgagttaatcgaagagaaagacgccggtcgcggtctgggcaactaatctcctgccgggcgtgaactcatcgcgcccgcatctttactgcatcgacaagtaatatttgtcataatgcgcgctgcaatttatccgtattaagagaatcagatgtccgataacgctcaacttaccggtctgtgcgaccgttttcgtggtttttatcctgttgtgatcgatgttgaaacagccggatttaacgccaaaaccgatgcgctgcttgagattgccgccatcaccctgaaaatggatgaacaaggctggctgatgccggacaccacattacatttccacgtcgaaccatttgtcggcgcaaatttgcaaccagaagccctcgccttcaacggcattgacccgaacgatcccgatcgcggcgcggtcagcgaatacgaggcgctgcacgaaatttttaaagttgtacgtaaaggtattaaagcgagcggctgtaaccgcgccattatggtggcgcacaatgccaattttgatcacagctttatgatggccgccgcagaacgcgccagtctgaaacgtaacccgttccaccctttcgccacttttgacactgctgcactggccgggctggcactcggacaaaccgtattgagtaaggcttgccagaccgctggcatggacttcgacagcacccaggcgcactccgcgctgtacgacaccgaacgcactgctgtgctgttttgtgaaatcgtcaaccgctggaaacgtctgggaggctggccgctatctgccgccgaagaggtgtaatcgagtcgatgcctgatgacatgcaatgattcaggcatctatagtgaggctattccacgcatcctgcatgatattcacggggaatagcgttaatggcagataatccagaccctagtagcctcctgccggacgtgtttagtccggcgacccgcgactggtttcttcgcgcctttaaacagccgaccgctgtccagccgcaaacctggcatgtggcggcgcgaagcgaacatgcgctggtgattgcaccgaccggctccgggaaaacgctggcagcatttctctacgccctcgatcggctcttccgcgaaggcggcgaagatacccgcgaggcgcataagcgtaaaaccagtcgcatcctctatattagtccgataaaagccctgggcaccgacgttcagcgcaacttgcagatcccgttgaagggtattgccgatgaacggcggcggcgcggcgaaacggaagtcaatcttcgcgtagggatccgtactggcgatacgcctgcacaggaacgcagcaaactcacccgtaatccgccggatattctgatcaccacacccgaaagtctctatctgatgctgacctcccgcgcgcgcgaaacgctacgcggcgtcgaaacggtaattattgatgaagtccacgcggtagcgggcagtaaacgtggtgcgcatctggcgttaagtctggagcggctcgatgcgctgctccacaccagtgcacagcgaattggcctttctgccactgtgcgcagtgccagcgatgtggcagcatttcttggtggcgatcgcccggttacggtagtcaacccgcccgcaatgcgccatccgcagatacgaattgtcgtaccggtcgccaatatggatgatgtcagtagcgtcgccagcggcaccggcgaagacagccatgccggccgggaaggctccatctggccatatattgaaacgggtatccttgatgaagtgttgcgccatcgcagcaccattgtctttactaatagccgggggctggcggaaaaactgacggcacgattaaatgagctttacgccgcacgcttacagcgttccccgtctatcgccgttgatgcggcccatttcgagagcacctccggcgcaacctctaaccgtgtacaaagtagcgacgtttttattgcccgcagtcaccacggctccgtctctaaagaacaacgagcaatcaccgaacaggcgctgaaaagcggtgaattacgctgcgtggtcgcaacctccagtcttgaactggggattgatatgggcgcggtggatctggtgattcaggtggcaacgccgctttctgttgccagtgggttacaacgcattggtcgcgccggacatcaggttggcggtgtatctaaagggctgtttttcccccgtacccggcgtgatttagtcgattccgcagtcattgtagagtgtatgttcgcaggcaggctggaaaacctgacaccaccgcataatcctctcgacgtccttgcgcagcaaaccgttgccgccgcggcgatggatgcattacaggtagacgaatggtactcccgcgtacgccgtgccgcaccgtggaaagatctgccaagacgtgtttttgacgccacgctggatatgctttccgggcgctatccctctggcgatttttctgcttttcgccccaaactggtctggaacagggagaccgggatattgaccgcccgacctggcgctcaattgttggcggttaccagcggcggcaccattccggatcgtggcatgtatagcgtgttattacccgaaggtgaagaaaaggccggtagccggcgggtgggtgaactggatgaggagatggtatatgagagccgggtgaacgacattatcactctcggcgctaccagttggcggatccagcaaatcacccgcgatcaggtgattgtgactcctgctccgggtcgttctgcccggctccccttctggcgtggtgaaggtaacggacgtccggctgaattaggcgagatgatcggcgattttcttcatttgctggcggatggcgcgttcttttccgggactattcccccgtggctggcagaagaaaatacgatcgccaatattcaggggttgattgaggagcagcgcaacgcgacgggcatcgttccggggagtcgccatctggtcctcgaacggtgccgtgatgaaattggtgactggcgtattattttgcactctccctatggaagacgggtgcatgaaccctgggcggtggcgattgccgggcgaatacatgcgctatggggcgctgacgcgagcgtggtcgccagtgatgacggcattgttgcacgtattcctgacaccgatggtaaattgcccgatgccgcgatttttttgtttgaaccagaaaagttgctgcaaattgtccgcgaggcggtaggcagcagcgcacttttcgccgcccgttttcgcgaatgcgccgcgcgggcattattaatgccggggcgcactccgggccatcgcaccccgctttggcaacaacggctgcgcgccagtcagttgctggaaatcgctcagggatatccggattttccggtcattctcgaaaccctacgcgaatgtctgcaagatgtttatgatcttcccgcactggaacgtttgatgcgtcgcctgaacggtggcgaaattcaaatatccgatgtaacgaccactacgcccagccctttcgccacaagtttattgttcggctatgtcgcggaatttatgtaccagagcgacgccccgctggcagagcgccgggcatccgtactgagcctggacagcgagttactgcgcaatctactcggacaggtcgatccgggggaattactcgacccgcaggtcattcgccaggtggaagaagagttgcaacgactggctcctggcagaagagcgaaaggtgaagaaggattgttcgacctgctgcgcgaactggggccaatgaccgttgaagacctggcgcaacggcatacaggcagcagtgaagaggttgcgagctatctggaaaatcttcttgcagtaaaacgaatcttcccagcgatgattagcggacaggagcgtcttgcctgtatggatgatgccgccaggctgcgtgatgccctcggcgtacgactaccagagagtttgccagagatttatttacatagagtcagttacccgcttcgcgacctctttctgcgctatctccgggctcatgctctggtcacggctgaacaactggctcatgagtttagtctcggtattgccattgtcgaagagcagcttcagcaactgcgtgaacagggtctggtgatgaatctgcaacaagacatctgggtgagcgatgaagtatttcgtcgtctgcgtttgcgcagcctgcaagccgccagagaagcgacgcgtcccgttgcagccacgacctatgcgcgattgctgctggaacgtcagggcgtattacccgccaccgatggtagcccggcgctctttgccagtacaagcccaggcgtttatgagggcgtagatggcgtgatgcgggtgatcgaacagcttgccggagtcggtttacccgccagtctctgggaaagccagatcctgcctgcccgcgtacgcgactatagcagtgaaatgctcgatgaattactggcaaccggtgcggttatctggagcgggcaaaaaaaactgggtgaagatgacggcctggtggcactgcatctacaggaatatgctgcagaaagcttcactcccgccgaagcggatcaggcgaatcgtagcgcgctgcaacaagcgatagtcgctgttctggctgacggaggagcctggtttgcacaacaaatcagccaacggatacgcgacaaaatcggcgaaagcgttgatctctctgccctgcaagaggcgttatgggcgctggtctggcaaggcgtcatcaccagcgacatttgggcaccgttacgcgccctcacccgcagcagttccaacgcacgcaccagtactcgccgcagtcaccgggctcgtcgtggacgtcctgtctatgcgcaacccgtcagcccgcgggtatcttacaacacaccaaatctggctggacgctggagcttattgcaggtggagccactaaacgataccgaaaggatgctggcgctggcggaaaatatgctcgaccgctacggcatcatcagtcgtcaggcggtgatagccgaaaatatccctggcgggtttccaagcatgcaaacgctttgtcgaagtatggaagactccgggcgaattatgcgaggtcgttttgtagaaggtctgggtggcgcgcaattcgctgaacgtctgactattgaccgattgcgcgatctggcgacacaagccacgcaaacgcgccactatacaccagtggcgctctctgccaacgatccggctaatgtgtggggaaatcttctgccctggcctgcacatccggcaacgctggttccaacgcgtcgggcgggtgcgctggtggtcgtttctggcggcaaattgttactctatctggcgcaaggtggcaaaaaaatgctggtctggcaggaaaaagaggaattactcgccccagaggttttccacgcgctgactaccgcactgcgtcgcgaaccacggctgcgctttacgctaacagaagtgaatgatctaccggtccggcaaacgccgatgtttacgctgctgcgtgaggcgggatttagtagtagcccacaagggctggattggggataaagaaaggactgacggatgcccgttcgcatccgtcagtattgcaggacggattattccgcgtccggctcttcagacttgtatttagcggcagtttctttgatcagctgctgcagttcgccacgctgatacatttcgatcacgatatcacaaccgccgaccagctcgccgtcaacccacagttgcgggaaggtcggccagttagcatatttcggcagttccgcacgaatgtccggattctgcagaatatcaacataggcaaaacgttcgccacatgcggcaagcgcctggactgcctgggcagagaaaccgcagctcggcagtttcggactacctttcatgtacagcaggatcgggttttcagcaatctggcgttggattttttcgatagtggtgctcattgtcttgcttcctcaaacttctttacggcagtaatctgacattgtagcgggtcagtgcggcatcggaaaataacattttcatcacgcttttgctattttatccctttgctctatttgttgcatttcaaatattcgtttcttctctgatgccggcaaactggcgtatttataaccatttttagctttcactgctgcatttttttgcgctcgccaacgaaacgtattttttaacaataaaagctattaactttctcttcttctatgcattagaatcatcaagttttgtaaatcagacgcaggcatgatagacctgcctttacagagggacgctcagtggcgcggataaaccgtattagcatcacgctctgtgctttactttttaccaccctgcctttaacgcctatggcccatgctagtaagcaagccagggagagttctgctaccactcatatcaccaaaaaagcagataaaaagaaaagcacggcaaccaccaaaaagacccagaaaacagcgaaaaaagccgccagtaaaagtacgaccaaaagcaaaaccgcttcttccgttaaaaaatcttccattaccgcttctaaaaacgccaaaactcgcagcaaacacgccgtcaataaaacggccagtgccagctttaccgaaaagtgtaccaaacgtaagggctataaaagccattgtgtgaaagtcaaaaatgccgcgagtggaactcttgccgacgcgcacaaagcgaaggtgcaaaaagctacgaaagtggcaatgaataaactgatgcagcaaattggtaagccatatcgttggggtggcagcagtccgcgtaccggttttgattgcagcggcctggtttattacgcttataaagatttggtgaaaattcgtattccgcgtacggcgaatgaaatgtatcacctgcgtgatgcagcgccaatcgaacgtagtgaactgaaaaacggcgacctggtctttttccgtactcagggacgcggcacagccgatcatgtcggcgtgtatgtcggcaacggcaaatttattcagagtccgcgcacaggtcaggaaattcaaatcacttctctcagtgaagactactggcagcgccactatgttggcgctcgtcgggtaatgaccccaaaaacacttcgctaaaactttaccctgttgttacggcaacagggtaagttcatcttttgtctcaccttttaatttgctaccctatccatacgcacaataaggctattgtacgtatgcaaattaataataaaggagagtagcaatgagtttcgaattacctgcactaccatatgctaaagatgctctggcaccgcacatttctgcggaaaccatcgagtatcactacggcaagcaccatcagacttatgtcactaacctgaacaacctgattaaaggtaccgcgtttgaaggtaaaagtctggaagagattattcgcagctctgaaggtggcgtattcaacaacgcagctcaggtctggaaccatactttctactggaactgcctggcaccgaacgccggtggcgaaccgactggaaaagtcgctgaagctatcgccgcatcttttggcagctttgccgatttcaaagcgcagtttactgatgcagcgatcaaaaactttggttctggctggacctggctggtgaaaaacagcgatggcaaactggctatcgttagtacctctaacgcgggtactccgctgaccaccgatgcgactccgctgctgaccgttgatgtctgggaacacgcttattacatcgactatcgcaatgcacgtcctggctatctggagcacttctgggcgctggtgaactgggaattcgtagcgaaaaatctcgctgcataataactgatggcaaatgcagcattgcctgaagcgctacgcttatcaggcctacgcggatcatcgatgtaggtcggataaggcactcgccgcatccggcaagataaatcgcacgttgtcagcaactgtaacgcagaaggttatccttctgcgtttttgtttaattagctgttagcaacgcaaactgtttcaggttgttttctggcactcataaacaccagcaataatgccagtcccgcgacaatcgctcccatcaccggcacaaagctgtatcccagcccagcggaaattaccgcaccaccagcagctgctcccagcgcatttccaagattaaaggcaccaatattgacactactagacagacctggcgcttcactggcgacacgcatcacgcgcatctgtaacggcggtacgaccgcaaaggttgctgcgccccacaccaccatgctaatagctgcgccgaactcattgcgggccaggaacgggattgccagcataatcaccatcaacaacaacaaaaagcctttcaacgtgccgttaacactacgatctgccagtttgccgccgagatagttaccgatagagaatccgacaccaatcagcaccagcattgccgtgacgaacaccggtgttgcgtgggtaatactttgcagtaccggagagatataggtgtagagagtaaacattgcaccagctcccagtaccgtcgtcagcaatgcagacagcacctgcggacgcattaataccgccagctcttttttcacttcaggtcgtgcccctgcaccacctttaggtaaactgaagaacagacttaccatactaatcactcccagccccgccgttgccagaaaactcatccgccagccgatggtttcacccaaccaggtcgccgccggcacgccaccgatatttgccagggttaaccccataaacatagtggcaactgcgctggcctgtttatgttttggcaccacgcttgcggccacgacactacccaaaccaaaaaatgctccgtgattcaggctggtcaaaatgcgactaagcatcagggtcatataatccggcgcgatggcggaaagtacgttgccgagcgtgaaaattgccatcaggaaaatcaacgcactgcggcgggcacgatgagaaagtagaagcgtcatcagcggcgcgccaaccattacgccaactgcataggcactgattaacattccggcagcgggaatgctgacatccacaccgcgcgcaatgacgggcaacaagcccattgggctgaactccgttgtcccgataccaaacgcgccaatcgccagcgccagcaacggatagttaattttcatgccttatctccacctcttcgcgtcattacgcgatattcattaaagtggcgaaagcatgacagcaatcacaaaaaaatgaaaataacaaaaagagaaaacacttttgccattttgctaacaaacaggaaggagatgcgagggagaacgcgctccctcgagaggaaatcagtgcagcgcggcagtcaaacccacggctacgatcaaaccgaggacgataatcgttgttaccagtgaaaatttaaggtcggtgctcatcaagttttctccttttttattaccacacaaaaagtgatattacgcatttttacacactgtgatgaaaaaatctcccgtcatttataatgataagtgtttttaccacttccccttttcgtcaagatcggccaaaattccacgcttacactatttgcgtactggccattgaccccttcctgacgctccgtgtcgtttttccggcgtaccgcaacacttttgttgtgcgtaaggtgtgtaaaggcaaacgtttaccttgcgattttgcaggagctgaagttagggtctggagtgaaatggaatggcaacaataaaagatgtagcgaaacgagcaaacgtttccactacaactgtgagtcacgtgatcaacaaaacacgtttcgtcgctgaagaaacgcgcaacgccgtgtgggcagcgattaaagaattacactactcccctagcgcggtggcgcgtagcctgaaggttaaccacaccaagtctatcggtttgctggcgaccagcagcgaagcggcctattttgccgagatcattgaagcagttgaaaaaaattgcttccagaaaggttacaccctgattctgggcaatgcgtggaacaatcttgagaaacagcgggcttatctgagcatgatggcgcaaaaacgcgtcgatggtctgctggtgatgtgttctgagtacccagagccgttgctggcgatgctggaagagtatcgccatatcccaatggtggtcatggactggggtgaagcaaaagctgacttcaccgatgcggtcattgataacgcgttcgaaggcggctacatggccgggcgttatctgattgaacgcggtcaccgcgaaatcggcgtcatccccggcccgctggaacgtaacaccggcgcaggccgccttgccggttttatgaaggcgatggaagaagcgatgatcaaggtgccggaaagctggattgtgcagggtgactttgaacctgaatccggttatcgcgccatgcagcaaatcctgagccagccgcatcgccctactgccgtcttctgtggtggcgatatcatggcaatgggcgcactttgtgctgctgatgaaatgggcctgcgcgtcccgcaggatgttagcctgatcggttatgataacgtgcgcaacgcgcgctattttacgccggcgctgaccacgatccatcagccaaaagatagcctgggtgaaacagcgttcaacatgctgttggatcgtatcgtcaacaaacgtgaagaaccgcagtctattgaagtgcatccgcgcttgattgaacgccgctccgtggctgacggcccgttccgcgactatcgtcgttaatcacccgttgcgggagtctcttccggctcccgcagccactccttattcagcgtctcactatcgccgagatactcaagcaaccaggttaacgcagggctcatatcattttgctgccatgtcagacaacatgcgctatccggaaaggggttttccagttctaatgctacccacttcccctcattaagccacggtttggcgaaatgtgttggcaccatccctatgcataatcctgcgctgatacaggttgcgctactttcccagtcaggcacgacaactcttttttggttatccagcaaccaggtaatacgtttaggtagcgttcggctggtgtcttcgcgcaccaagctcggccagttgcgcaacgtatcatcgctgaacgggccatccatcaacgccagcgggtggtgactggcaacaacgcaactccagcttagcatccccatatcccggaaggcataacgaccgcctaccggaatcgcgcgtgttgcgccaatcgccagttccacgcgcccgtcggaaagcgcatcccagacaccgttgaacacttcctgaaagacaagaagttcgacatcatcaaaatggcgataaaaatcaacgatcatctgccgtgtacgttctggcctgacaatattatccactgcgatagctaactgaccgcgccagccgttcgctatctgctgacattgctggcgggtgatctgcatttttttgacaacagagcgcccttctttgagaaaccacgctccagcagcggtcagctccacatcacggtgccgtcgttcaaagagcggcaccgccagccactcttccagctgacgcacggtatagctgaccgcagaaggaacgcgatgcagctcctgtgccgcagcgctaaaactaccattacgcgctaccgcatcaacaacttcgagactatattcactccacatagtctgcctgcaaaatttttgaaaccagtcatcaaatattaccgtttcacaacactaatttcactccctacactttgcggcggtgtttaattgagagatttagagaatatacatgcaacctgggaaaagatttttagtctggctggcgggtttgagcgtactcggttttctggcaaccgatatgtatctgcctgctttcgccgccatacaggccgacctgcaaacgcctgcgtctgctgtcagtgccagccttagtctgttccttgccggttttgccgcagcccagcttctgtgggggccgctctccgaccgttatggtcgtaaaccggtattattaatcggcctgacaatttttgcgttaggtagtctggggatgctgtgggtagaaaacgccgctacgctgctggtattgcgttttgtacaggctgtgggtgtctgcgccgcggcggttatctggcaagcattagtgacagattattatcctagtcagaaagttaaccgtatttttgcggccatcatgccgctggtgggtctatctccggcactggctcctctgttaggaagctggctgctggtccatttttcctggcaggcgattttcgccaccctgtttgccattaccgtggtgctgattctgcctattttctggctcaaacccacgacgaaggcccgtaacaatagtcaggatggtctgacctttaccgacctgctacgttctaaaacctatcgcggcaacgtgctgatatacgcagcctgtagtgccagtttttttgcatggctgaccggtagtccgttcatccttagtgaaatgggctacagcccggcagttattggtttaagttatgtcccgcaaactatcgcgtttctgattggtggttatggctgtcgcgccgcgctgcagaaatggcaaggcaagcagttattaccgtggttgctggtgctgtttgctgtcagcgtcattgcgacctgggctgcgggcttcattagccatgtgagcctggtcgaaatcctgatcccattctgtgtgatggcgattgccaatggcgcgatctaccctattgttgtcgcccaggcgctgcgtcccttcccacacgcaactggtcgcgccgcagcgttgcagaacactcttcaactgggtctgtgcttcctcgcaagtctggtagtttcctggctgatcagtatcagcacgccattgctcaccaccaccagcgtgatgttaagtacagtagtgctggtcgcgctgggttacatgatgcaacgttgtgaagaagttggctgccagaatcatggcaatgccgaagtcgctcatagcgaaagtcactgatctatatcgatatacttatacttaggctgctaacaaaattttgttgtatgattgaaattagcggcctatactaatttcgagttgttaaagctacgataaatattatgtttttacggggacaggatcgttcccgactcactatggatagtcatttcggcaagggttcctcctttccctctgttctacgtcggattatagactcgcggttttttctgcgagatttctcacaaagcccaaaaagcgtctacgctgttttaaggttctgatcaccgaccagtgatggagaaactatgagtagtagctgtatagaagaagtcagtgtaccggatgacaactggtaccgtatcgccaacgaattacttagccgtgccggtatagccattaacggttctgccccggcggatattcgtgtgaaaaaccccgatttttttaaacgcgttctgcaagaaggctctttggggttaggcgaaagttatatggatggctggtgggaatgtgaccgactggatatgttttttagcaaagtcttacgcgcaggtctcgagaaccaactcccccatcatttcaaagacacgctgcgtattgccggcgctcgtctcttcaatctgcagagtaaaaaacgtgcctggatagtcggcaaagagcattacgatttgggtaatgacttgttcagccgcatgcttgatcccttcatgcaatattcctgcgcttactggaaagatgccgataatctggaatctgcccagcaggcgaagctcaaaatgatttgtgaaaaattgcagttaaaaccagggatgcgcgtactggatattggctgcggctggggcggactggcacactacatggcatctaattatgacgtaagcgtggtgggcgtcaccatttctgccgaacagcaaaaaatggctcaggaacgctgtgaaggcctggatgtcaccattttgctgcaagattatcgtgacctgaacgaccagtttgatcgtattgtttctgtggggatgttcgagcacgtcggaccgaaaaattacgatacctattttgcggtggtggatcgtaatttgaaaccggaaggcatattcctgctccatactatcggtagcaaaaaaaccgatctgaatgttgatccctggattaataaatatatttttccgaacggttgcctgccctctgtacgccagattgctcagtccagcgaaccccactttgtgatggaagactggcataacttcggtgctgattacgatactacgttgatggcgtggtatgaacgattcctcgccgcatggccagaaattgcggataactatagtgaacgctttaaacgaatgtttacctattatctgaatgcctgtgcaggtgctttccgcgcccgtgatattcagctctggcaggtcgtgttcagtcgcggtgttgaaaacggccttcgagtggctcgctaaaggctattctatcgccccctctccgggggcgatttcagatcaggcttctgtgcctggttgattcatggcattttctcgtgccgccagcacacgttctaccgtatctaccactgcctgagtttgtggatcgatttcaatgttgacgcgtgcgccaagttttttcttcccaagagtcgtgcgttccagtgtttcccgaattaaatggacgcaaaaacgcgttggcgtgacttcgccgacggtcaggctaataccgtcgatgccaataaatcctttgtacagaatatatttcatcaactgactatcctggactttaaaccagatctggcgattattttcactggttaatattttcgccacttcagcagtggtcataatatgaccactcattaagtgtccgccaatttcatcactgaatttcgccgcacgctcaacgtttacccaatcccccacttttaaatcgccaagattggtaatgcgtaacgtttctttcatcaggtcaaaactgacatggttgccgttaatttccgtcacggtcaggcagcaaccgttatgcgccacggaagcaccggtttccaggccgtccagcatgtggtcgggtaactccaccacatgcgtacgaaaatttggtttctcgtcaatgctcaccagttttgcggtgccctgtacaatccccgtaaacatacttacaactcctgaaatcagttaagacattctgttcagcacaatagcaggtggaaaacgcccttaccagtgaaggggtaagaatggctattttttcactggagaattaataaatcctcgctacaatagactgaatttcccctgcttcttctttttgctgcccattcaggcggctttttagtctctcatataactacaaataaaaggtgttcacgtgcagaagtatatcagtgaagcgcgtctgttattagcattagcaatcccggtgattctcgcgcaaatcgcccaaactgcgatgggttttgtcgataccgtgatggcgggcggctatagtgccaccgacatggcggcggtcgctatcggtacttctatctggcttccggcgatcctctttggtcacggactgctgctggcattaacgccggttatcgcgcaattaaatggttccggtcgacgtgagcgcattgcgcatcaggtgcgacaaggtttctggctggcaggttttgtttccgttctcattatgctggtgctgtggaatgcaggttacattatccgctccatggaaaacatcgatccggctctggcggacaaagccgtgggttatctgcgtgcgttgttgtggggcgcgccgggatatctgttcttccaggttgcccgtaaccagtgtgaaggtctggcaaaaaccaagccgggtatggtaatgggctttatcggcctgctggtgaacatcccggtgaactatatctttatttatggtcatttcggtatgcctgagctcggtggcgttggttgtggcgtggctactgcggcggtgtattgggtcatgttccttgccatggtttcttacattaaacgcgcccgctccatgcgtgatattcgtaacgaaaaaggcaccgcaaaacccgatcctgcggttatgaaacgactgattcaactcggtttgccgattgcgctggcactgttctttgaagtgacactgtttgccgtcgtggctctgttagtgtctccgctcggtattgttgatgtcgcaggacaccagattgccctgaactttagtagtctaatgttcgtgcttccaatgagcctggcggcagcggtaactatccgcgtaggttatcgtctgggtcagggcagtacgctggatgcgcaaaccgctgcgcggaccgggcttatggtgggtgtctgtatggcaaccctgacggccattttcacggttagtctgcgggagcaaatcgccctgttgtacaacgacaatcccgaggttgtaacgctggctgcgcatttgatgttgctggcggcggtatatcagatttctgacagtatccaggtgattggcagtgggattttgcgtggttataaagatacgcgttccattttctatattacctttacggcttactgggtgctgggcttgccaagcggctatattctggcactgaccgatctggtcgttgaacctatggggccagcaggcttctggataggctttattattggcctgacgagcgcagccattatgatgatgttgcgtatgcggttcctgcaacgtctgccgagtgccatcattctgcaacgagcatcccgctaataaagacaaggcgcaaccttcacgggttgcgcctgtatttttacgcaggctggagcgttgcgccaatcccgtcttcgtctggctgtaatttcagagcgttacacagagtttgccgactggcatctgttatctcaacgtgtatatccccggtaacttcccctttcacattgatgaagtcaggactaatttcttttgcactggtttgcaggcaaatcgctccctctccgcgcaggcgtttcactttcagttgcacatgcgttgccgcatcagtgatcagccacagttttccaccattcagattgatgttaccaacaatgaaagtgacactgtcaccttttaccgtactgccgtctagaatcaacacaccgccctgctgtacagtaatcgtactttgttgcagctctgcgccataaccaataatcatactagcgccgtccagtaatgcaacactcccggtcagttcaaccggtgcgcgatcttcctctacgacaaaattttcgtccgcgctggtgggactcaacaggatcactgtcccaccttgtattaccgcgttttccagcgtaccggcatgcacttcagcccgaccacccacattcacggacaggttttgcgtcttaccggaactgtagagctgaaggccatccgtccccagacgataaatggatccattctcaacaatagtgtcagagtcttcaccaccgagattattcatggtgccaccagcaagcaacgtatcactggctttcccggccagcataaaaacgccgccctgattaatctcacaattgctggcttccccacctggatacaccaacaattcaccaccttcatctaccacgaccgcactggttgtcccattaaccaacaggccgccctcttgatcgagaatgattttttccgcgcgatgtccttccagtacacgcaggttaccgccattttccagcaacaaaccgcaggcataacctttatcaacgctgaattcaccttcgggatggcggccattaaccgtagcgagcgtagagagactaattgcgcctccctcggactgaacaatatctgtggcaatggcaccatcgctgacgcttagcgtgccattgttaccgtactgtgtgcatttggcgatcccaccggttgccactttcaaccagccagcccccgtgaccacggtattttcggctcttccgccagcttcaacaatcaactcgccttcagtaagttgcgtcgcgccaatgacctcgccggtcttaacaatttgcacgttcccgtcgctcatcaagtttttcgcatcagatcccatgatttattcctttgctgcatctgtgtgcctttattgctacctaagtgtaaaggctacggaggatttatccacgacagatttgagatggtggcaaacaactctgtttaaactctgatacacgaattattgggttgtatcagatgtaaatgcgatcctgaataaaaatcacccttgcaaatcaacaaaatatagccaatttgcttaaaagctctgcaaacggtcgaaatagcgcagaaaattacgttttgcctcttgccaccttcccactctgccgctaatattcgtccccgttgtcacctacaacgttgcgttcatagctcagttggttagagcaccaccttgacatggtgggggtcgttggttcgagtccaattgaacgcaccatcctgcgtccgtagctcagttggttagagcaccaccttgacatggtgggggtcggtggttcgagtccactcggacgcaccagattttcttaatctggtcttctcctttttccctctgtttcttctctgtatccaatacgttaaaagatttacactgtcttcgtatgcgttatcagaaggagaatcgctatggcaactttgttacaacttcattttgcttttaatggcccatttggcgacgcaatggctgagcagcttaaaccacttgctgagagcattaatcaggaacctggttttctgtggaaggtatggacagaaagtgaaaagaaccacgaagccggtgggatctaccttttcactgatgaaaaaagcgcccttgcctatctggaaaaacatactgcccgactgaaaaatctcggcgttgaggaagttgtcgccaaagttttcgatgtcaatgagccacttagtcaaatcaatcaggcaaaactcgcctgacagaatttaatcaagggcggttagcgcccttttcatccctgtctgaaatttctcaaattctaaaaatctcaaccaaacttatctgataacactaaattcgaaagaatgcgtacaggtaagtaacaatgaaaaaaattgctattgtgggtgccgggcctacggggatctacaccttattcagccttctacagcaacaaactccactttctatttctatcttcgagcaggctgacgaggccggtgtcgggatgccatacagtgatgaggaaaacagtaaaatgatgctggcaaatattgccagtattgaaataccgccgatttattgtacgtatctcgaatggctacaaaagcaagaagacagccatctccagcgttatggcgttaaaaaagaaaccttgcacgatcgtcagtttttaccgcgaattctgctgggcgaatatttccgcgatcaatttttacgactagtagaccaggcacgacagcaaaaatttgcagtggctgtttatgaaagttgccaggttaccgatctgcaaattacaaatgctggcgtcatgctcgctacaaatcaggatttacccagcgagacgtttgatttagcggtgatcgccacgggtcacgtctggcctgatgaagaagaagcaacccgaacgtattttcccagcccgtggagtggcctgatggaagcaaaggtcgatgcgtgtaacgtgggtattatgggaacatccttgagcggactggatgcggcaatggcagtggctattcagcatggtagcttcattgaagatgataaacaacacgtcgtttttcaccgcgataacgcaagtgaaaagctaaatatcacgttgttgagccgcacgggtattttacccgaagccgatttctattgccctattccctacgagcccttacacatcgtcaccgatcaggcattaaatgctgagattcaaaaaggcgaagagggccttttggatcgggtatttagattgatagtagaggaaatcaagtttgctgatccagactggagtcaacgcatagccttagagagcctgaatgtcgattcctttgctcaagcctggtttgccgagcgcaaacaacgcgacccatttgactgggcagaaaaaaatctccaggaagtcgaacgcaataaacgagaaaaacatactgttccctggcgttatgtcattctgcgcctgcatgaagccgtacaggaaattgttccacatctgaatgaacacgaccataaacggttcagtaaaggccttgcccgggttttcatcgataattatgcggcaatccctagtgagtctattcgtcgcctacttgccttacgtgaagcgggaatcattcatattctcgccctcggtgaagactacaaaatggaaattaatgagagccgcaccgtcctgaaaacggaagacaacagctacagctttgacgtttttattgatgcccgcggacaacgtccgcttaaagtgaaagatatccctttccctgggctacgcgagcaattacagaaaacaggggatgaaatccctgatgttggcgaagattatacgttacagcaacccgaagatattcgtgggcgcgtagcgttcggcgcgttgccctggttgatgcacgaccagcctttcgttcagggacttacggcatgtgcagaaattggtgaggcgatggctcgggcggtcgtaaagcctgcatcccgtgctcgtcggcgtcttagctttgattaaaggtaaagctatcagcactcaacaaactgatgctgttcattaagacgatagcggactccggctcgaatattgttttcaccttcaatggcgacggcgaagcgaactctttcgccgtcatgatatgccagtgcggcgcttcctcctggcccgagaataatactgtcgaccacgcccgtgctcactaccgtactattttcaccgctggcaatgatgtgtacattgtcgccgctgttggcaattctggcgtttgcgccaaagctggcgatttgcaccaggtcaccattactggcgacatgacaccgttcacccaatgtacaaacgcgtactcgcattccggtattcgcaatccgactgctatctccagcgctgcttatccggctagaattaccggttacagcaacccgtgcgcgttcaccggagctgccaatgtgactgttaaagccgacacttccaatccgcacgctataacccatactggcaatttgcgcggcatacccagcggttgcgattctggcgttatcctcacaacagccgatgcgagcatgatcgtcgctgcgggcaaactgactgcaaaatggtctctctccggggtctgtggccagtttttgcatagaggaaacttcctgatgcgcgaagttttcatccgccagccattttttccacgcatactcaaccagactctccgcccagtccgtatatccttcctcaatcagtgcatgatgaatatcggcataactaccgccgcgtgggaaatggcgcaggaaccagcgatacatcaccgctccgatacgccattctcgcaggtctgcttgtgtaatgatcattcgttagtgccggtgatagccatcgaccatgcttttaaaggtttcgtgtggcgtacgccccgtggtgcaaagataaagatgaccgaagataaaaaagaggcttataaatgccagagcaaaatgtgtctgcaataaccagtatcttacgccaggaaacacatctcccacggcttgcggatagagacacagcagccccgtcaatagtaacaacggcagcaatccatacatgacaccaacataggcgacctgctgtaagggattaaatttagactgggttgttgccgggaaaggatgttcttccccctgcataatgccaaacaaataaaatcgcgtttgttttgccgctcgttccagccacccctgacgacgaatgcgatagtggtgaccattatccccaacggcattgatcagcacaaagccgagccagcatgccagtaacaaaaatccgcaaacttcatgcaccgcaaccagacttttaaccgcagttgcgcccaccatcgcaaagtgatttatcagcccactggccagcaacaatacaaagagtaacgcattgctccagtgccataatctgaccgctttgctgtaaagataaatcttctcaccatgatcggtggcacttttcttcacgccacgagcacgaagcaaggcatgcagccccagcaccaaccacatcccaaccagcaatactccggcaatgatcaaccacaccggccaaaattcgggagtgaactgtggcacatagttcgctaactggctctgaaactgttcagcatgttggctcgggttcatacattttcctttttaatcaaatgttgaccgaaccggcgatacagatgcggtttcccggcaccaggtagctgatattgatagtatttattttgctgcaaccacgcctgaatttctgggctatcttcgcgaccaaagatcaatgcgtgttccgggcaggcgctgacgcaaatgggcggaaagccttttgccagtcgggactcagcgcagaaatcacatttatctgccactttagtgacagggttaaggtagcgaacctggtacggacaagcgccaatgcaataactgcagccgatgcactggcttttttctacccgcacgatcccctgctcatcacgccagctcgcccccgtcgggcaaacgtcgatgcacggagcatcttcgcagtgctgacaactctggcgaaaaaagtgatactgcgtttcgttgtcgttatcggtgactggaatgtgtgctatgcttaaacggcttccctgagcggggacgtggttagttttacggcatgcgcgggcgcaaatattacagccattgcaccgactctcgtcatgaatcatggcataccgaacttccttttcttgcctcgtgttcgctaacagagaagacgcagaaccagtaaaaaagattactgttcccatccccagaacaaatttgcgtcgagtgaaggacatctgattatcccctaatgcagtggctgcaactgtccaccctatccatgacatctccctgaaatttcaggggttctgaaactgctctacctcgaaccattcgcataagccataagccttgccataggtcataaatcgctcgctaaacaagtacaacaccgccgtgctactctccacctgccgtatatcggcatattcaggtgcaacatccatcgcggcgatcgcggcttcaatctgcgcttcctggaagtaatatggcgcttgcatcagcatggcgactttgtaaggacgaggatacgtctggcactcaaaacgaacggcgtgtgcaatggcgcgacaaatgtcctgctccacaacttgcaaagacatcgccgcgtagttttcactcatggcctgcgtactgtaatagtaatcatccttgcttcccgtcaaacaagcgatatccgcgtagtctccgttctgcttaatgctttccagcaaaacactcagttcctcttctgcaaccaaatagggtgggctgagaaacacggcgcgcgccaccagctgcccagccgcagaatgctggcgaatgaactcagccaggatttcagcaggttctggttcggttaccgtatcaacggggtgacgcatcccctgcaaccattgccgcttcgcctcgtcaacttcgctgactttcgctaacggcaattcatcctgatggttcatcttacccattccttacgcaggcagtagattgtgtgctgccagatcggcggcaatatcttccagccccagacgctgcaatgtttcgcgggttggacaaccaagctgtgggtcccagcccatttctttgtagaacatcgtgaggctagcatgcatatcgtcacgatccattttgtcagtaccttcagtaaagaccgggatctgcggatccttgtcgaatacccaggaacagataagatcgtgttcattacgcatatctttggtttgcatcagttttaccgtgtaggcacgatgcaacgtaaaaatacgctctgcagctaaatctaatttttcctgagtcatctcttcgccggtgatcgctttgaagaatttggcttcaagcgccagatcgccccggtaattacggcttttcagcgggctaacggtcattggccagacccagttgcacagggtgacggcgttatgcaaacagacccgcaacaggctccactttgcatatttaatttttgcgtcattgattggcgtgtagtttttggtttcatcgtaagcatcttcagaaccaaaaagttctttcgccacttcacgttgcagtttcaatggcaagccggaaccaataaagttgatatgggtatgcgtcatgcagtcacggttgaacatacagttaacaatggaaccgacctgcgcactcgcttcattggcatggtgaaccggatagccaaacgggctccagagtttatttttcgcgtagccccagtactcttcacccaaattccagcgttctgcgatggcataactaccatcagccaggtgactcagctcacccacacgatgcgccagacggtagtaaaaatctttaatgaagttaacgtcacccgcttccagttgatcccagcgaatttctgcatactcttcagctggcagaacacgcttgaacacacctttgctgtaacaataagtaaagtcgcgatgcaactgcccgtagttacaccataggccgtagtcatcgaacaaattcagacccaccaggttaccaatcacacgaccatcgtctttatcttcaaaatctttcggcccgttcgggaagatggtggtatggacaaagtttgctacacaagtgttaccacctgtgctgggcacgccaaactctttcacccgaggaatattcatttgggtcatacaacggatcgggcaagagtggcagccgctcatttttactgtgtatttctctgccgccggtcctaagtcaaaaacggatttataggtacgaaagccgaccgtattctgattgcctggcggaatttcacccgtttcaatcggaccaccttcagccgcgccccaaaacagccctttacgtgctgtccagcgactcttgggatcactatactctgcccagctttgtggcgtacttggcacgacatggttgttattcgcaccaataagttcagtcatcatgtaatcattgagacgcttcatctcctgacgatcggcaatgttgacccctttcgtcccttcaaccgcaatcgctttcaggtttttgctacccattattgcgccagttcccgcaccgccgctgtggttacggctattcaacatgccagagagaggaacaaggttttccccagcctgaccaatagccgccacacaggtttccggactggtcaatcgacaaatttcttccgtcgttgcgcgcgtcccttttccccataagaaatcggctttttccaggctaactttgtcatctttaatcttcagccataccggacttttcgccttcccttcgataataatgacgtcgtatccagcgaatttcatttgcgctgcaaaaaagccacccatatgggcatcgacgactaaatttcctttggtaaaagtagaaagactggtgatatttacgcgagaactacagggggcaccagatccagttaatgggccggtagcaaagactaatttattcgcttcatcgaaaggtttcgtgcctggcggtacttcgtcatacataattttgtagccgaagcccatgccaccgacaaaacttttaaacttactggaatcttcgagggtaatatttcctgtcgtgagattgactcttaatatattacctgtccaaccgttagccatgattttttcctttgcaagattcacacagtaatatctttccactcgataatttttaacgcccctgttgggcaggcgtttgcgcattcaccgcataacacacatttgctggattttttactttcggtatttacggtggccatcatccacgggcatgccgtagtacaggcgctacagccaatacagcgtttatgatcgacggtaatacagccttctttctgctgccaggtaatcgcaccaatcgggcagacgttcatgcattgcggctctttgcattgacggcaggtgtccgcggtatagttgagatcgccatacaggccgccgccagagccaaccccgttgtcgccaaagaaataattgcgatggattttgatacgggagaagaatgtccctacactgccatcgttgaagttggtacaagagatttcacagcggtggcaacccgtgcatcgcgctcgctgggtcaccagcacccctttgggggtatttatcaaccctactgtgccgctatcaatatcttcctgtttgcaacccaaaagactcagtaacgcaggggcaattgttagaccagcaaggccttttccacttatacgcaagaattctaatcgcgttaagccaatatctaatagtggacgatcaaccgggttcatttatttcgcatcctcttcgcaaacacagtgctgacaattcagcagcctgatattaagcattcaactaatacgctgctgactctgtccccaacaccagatattttccctaacccgatagtgtatgagaaaagattaacgccgataaactaatcctttatggttaggagaaaaaataatgtgattattctgagcccttaacattgatcgttatcaattaaaattacaaagcaagaaattataagtgaactgatatttattatcatttgaaataaatttaacttaagcgacaattatttgtgactttcattgcagaaaataaaaataacattatcgctataaattaaaatacataccgaaattcgtataatttcagcagttgttatttagaatgattaactggaccgcaactgaagcaagaatatcaggatgaagcttaccgcctcatcctgaatggtcattttaccagtgcgttaatgacggtttccatcgcctgcttttccagctcactgcgctgaatgcgtttattggctaatgctgtacgtaatacgcctgcgataacaatatgctttggttcctgccccagatcgcgcatttccagcacaactttaccgacaactctgcacatttctcggtacagttcatcctcttttgtccgatttcccattctttatacctatttatcatgccaactatcagcatatatcaatctaaccaattaaacaaaaatcaaacaaaatcagacaaataacgcgataaattattttaactgtagcaattgagcgatgatatatttatacaccggatgaactttcacttatcctcacactgacaacttcggcaccagacgttgcgcaaacagtgaagtttttgcgtaaccttttccctggaacgttaaatctttgataacaatttattgtctaacaagttgtatattttttgaaacgctgtttttgttttccttttggattaatttcagcgtataatgcgcgccaattgactcttgaatggtttcagcactttggactgtagaactcaacgactcaaaaacaggcactcacgttgggctgagacacaagcacacattcctctgcacgctttttcgatgtcacctatccttagagcgaggcaccaccactttcgtaataccggattcgctttccggcagtgcgcccagaaagcaagtttctcccatccttctcaacttaaagactaagactgtcatgaaaaagaccaaaattgtttgcaccatcggaccgaaaaccgaatctgaagagatgttagctaaaatgctggacgctggcatgaacgttatgcgtctgaacttctctcatggtgactatgcagaacacggtcagcgcattcagaatctgcgcaacgtgatgagcaaaactggtaaaaccgccgctatcctgcttgataccaaaggtccggaaatccgcaccatgaaactggaaggcggtaacgacgtttctctgaaagctggtcagacctttactttcaccactgataaatctgttatcggcaacagcgaaatggttgcggtaacgtatgaaggtttcactactgacctgtctgttggcaacaccgtactggttgacgatggtctgatcggtatggaagttaccgccattgaaggtaacaaagttatctgtaaagtgctgaacaacggtgacctgggcgaaaacaaaggtgtgaacctgcctggcgtttccattgctctgccagcactggctgaaaaagacaaacaggacctgatctttggttgcgaacaaggcgtagactttgttgctgcttcctttattcgtaagcgttctgacgttatcgaaatccgtgagcacctgaaagcgcacggcggcgaaaacatccacatcatctccaaaatcgaaaaccaggaaggcctcaacaacttcgacgaaatcctcgaagcctctgacggcatcatggttgcgcgtggcgacctgggtgtagaaatcccggtagaagaagttatcttcgcccagaagatgatgatcgaaaaatgtatccgtgcacgtaaagtcgttatcactgcgacccagatgctggattccatgatcaaaaacccacgcccgactcgcgcagaagccggtgacgttgcaaacgccatcctcgacggtactgacgcagtgatgctgtctggtgaatccgcaaaaggtaaatacccgctggaagcggtttctatcatggcgaccatctgcgaacgtaccgaccgcgtgatgaacagccgtctcgagttcaacaatgacaaccgtaaactgcgcattaccgaagcggtatgccgtggtgccgttgaaactgctgaaaaactggatgctccgctgatcgtggttgctactcagggcggtaaatctgctcgcgcagtacgtaaatacttcccggatgccaccatcctggcactgaccaccaacgaaaaaacggctcatcagttggtactgagcaaaggcgttgtgccgcagcttgttaaagagatcacttctactgatgatttctaccgtctgggtaaagaactggctctgcagagcggtctggcacacaaaggtgacgttgtagttatggtttctggtgcactggtaccgagcggcactactaacaccgcatctgttcacgtcctgtaatattgcttttgtgaattaatttgtatatcgaagcgccctgatgggcgctttttttatttaatcgataaccagaagcaataaaaaatcaaatcggatttcactatataatctcactttatctaagatgaatccgatggaagcatcctgttttctctcaatttttttatctaaaacccagcgttcgatgcttctttgagcgaacgatcaaaaataagtgccttcccatcaaaaaaatattctcaacataaaaaactttgtgtaatacttgtaacgctacatggagattaactcaatctagagggtattaataatgaaagctactaaactggtactgggcgcggtaatcctgggttctactctgctggcaggttgctccagcaacgctaaaatcgatcagctgtcttctgacgttcagactctgaacgctaaagttgaccagctgagcaacgacgtgaacgcaatgcgttccgacgttcaggctgctaaagatgacgcagctcgtgctaaccagcgtctggacaacatggctactaaataccgcaagtaatagtacctgtgaagtgaaaaatggcgcacattgtgcgccattttttttgtctgccgtttaccgttactgcgtcacgcgtaacatattcccttgctctggttcaccattctgcgcactctctacactaggcgcattgctggctgcgggagttgctccactgctcacgctaaccggataccctgcccgacgatacaacgctttatcgactaacttctgatctacagccttattgtctttaaattgcgtaaagcctgctggcagtgtgtatggcattgtctgaacgttctgctgttcttctgcgcttagtggtcgatgtacttcaacataacgcatcccgttaggctccacggaatatttcaccggttcgttgatcactttcaccggcgttcccgtccgcacgctggagaacaaggctttaatatccggtgcattcatgcgaatacacccactactgacgcgcaaaccgacgctgtccggcgcactggtaccatgaatgaggtattcgccattaccatgcgcgaggcgcagtgcgtaacgtcctagcgggttatttggtccggcaggaacgactggcggtaatttaatgccacgctccaggctacgctgacgaatgcctgccgtaggcgtccaggttgggttagggattttctgcccaacacgcgtttccatcaccggcgtttccagcccctgcaatccaatacctattggataaacctgcacaatattttctcccggcggataataataaaggcgcagctctgcaaggttaacgataatcccctgacgcggtgcatcaggtaataacagttgactaggaatagttatcgtcgtaccaggttttggcaccggggcgatagtgttattggcttcaaggatcaacattgccgcagtatcaaaacgtcgggcaatagcctgaaggtttttatccccttcttgcaccgtatacgtttgattttgcccaaccagtcggcttccggttggtggtagcggataatcaaccgcccaggcagcctggatggcgctaaaagcgccgataagcgtgagtgtaagcaaagacgcgcgtttcattgtaaacctcctgtatttgccggagactcacgctgaaacgtcggatggcgcttatgttcacctgaaaccaaaacactcctgtgcaggtcagtgtaaacattgaccatccggcaatgtgagccaaccggatgaaagctgtccttttagtttagctaagtgcagcggctttggcgcgaattgcgcgaatcatcgcttccagaccttgactacgagatggggtgagatgttgggtgagcgccattttttcaaaccacggacgcacatcgaaattgacaatatcctgcggcgtcatctgatcgtagagaataaagacgaccgcaataagccctttcacaatcgccgcatcgctgtcgccctgtaattcaataattccctgggcattctggcgcatgacaatccacacctgactctgacagccctgaatgctattttgtggacttctgtcttcgtcgcgtaattctggcagacgctggcccagctcaataatgtagagatatttctcttcccagttggcgcagcgtaaaaaattacgcagcaacttttctttatccggcaataaagccatagtgcctccctgttatcccagcaaacggtgaatacgttgcaggccggtcaccagacgatccacttcttcatgggtgttatacatggccaggctcgcccgacacatcgcagggacgttgtaataggccatcaatggcattgcgcagtgatgtccggtacgcacagcaatgccgtaattatcgagaaaactgccaacatcataggcgtggtgtttaccgagattaaaagcaataacgccaagcctgttttgtgggccatagagagtgagatccggtacagattccagctgacttagcgcataatgcatcagattctgttcatactcggctatgttattaagccccagcgcgctaacatactccagcgccgcgccaagaccaatgatgcccccggtattgggtgtaccggcttcaaaccgccatggtgctttggtccaggtagtgccttcactcaggctgacggtggcgatcatagaaccgcccccttcccacggcggcatctcctgcaacaaggcttctttcacataaagaatgccaattccggtggggccatacagtttatgcccggagaacacgtaaaagtcgcaatccagcgcctgaacatccaccggatgatgcatcaccgcctgagcgccatccaccagcacttttgcgccatgctggtgcgcaagcgtgatcatttccgccagtggattttctgtgccaagcacgttggagacatgagtaattgccagcaggcgagttttctcatcaaacagcgtaggcagcgtctccagttgcaacgtaccatcgggattgagcgggatcacacgcagctctgcgccaacgcgtgcgcaaagcatctgccagggaacaatgttagcgtggtgctccatctgactgatgatgatgttatcgcccgcccgcacgttgctgttgccccagctattggcgaccagattgatcccttccgtcgtgccgcggacgaacaccagctcttccgcgctacgggcattaataaacaggcttgcccgcttgcgcacgttctccattttctcggtcgcctgggcgcttaaggtatgaataccacgatgcaccgccgcgtagccatgacgataaaactcggcctcggcgtcaatcacctggctcggtttctgcgcactggcggcgctgtcgagataagccagcggcaaaccgtttacctcacggctaagcaccggaaagtcggcccgcactttgtcgacggaaaaaatcatcttgcacctcctggcagccgttgaccgattcgggccagcacctgctgtttaagcccctcatcacgcagtgcttccgtcagttcggcagcgaaggcgtaaatgatcatctgctgggcatcctgctgattgatcccgcggctgcgcagatagaatatctgttcatcatcaatacgccccaccgtcgcgccgtggctgcatttcacatcatctgcatagatttccagctgcggtttcgtatccacttccgccagtttgcccatcagcagattgttgttggtcatctgaccatccgttttgatggcgtgctgcgcgacgttgatcaaaccgttaaataccgcgcggcctttgtcgctgacgatagttttgtgcaactgtcggctgttacaaaaacctttattgtgttccagccaggtacgggtatcacacacctcgtttttcaccggcatcgccaggctattgatccgcagcgtgctgttttcgccattgagttgcgtactggtgttgtgtcgtaacactgcgccacccagcaggaaactgtggctaaatgcggtggcatcctcagccagcaacaaatcgttatgagcaaagtggtgactgagcgggttttcaaacgccagcttgatatgctgcaagtgggcattcgctgcgacgttgatagtgaaccgtgccccggtaaaatgacgagcatcattcaggctgacaaaatgttcgatcaccgttgcttcggcaccttccgccagatccagatgatgtcggtaatgggcagtgttcacctcttcacctgccacgccctgggtgatatgcattaacagcaatggctttgccggccgttgaccgcgcttcacggcgatatgcgtcacgctttgtgccaggctttccgtcaaatgcagaaacacttccgcctgaatagcgtcgggtaaaccctgacggtcgtcgttaatgctcacttcatatccgctgccttcagttgcatcgctcagtgcgggcacgtaacgcccatcgacaaacaccagccgcacggagtctaacgttaacgctaaggcattacgctgctgtggggatatctctcccgcaatgctgacaaactggctattgatcagcccttccagcggcgtatatttccagttttcatgtttacgtgtcggcagtccggtacgcagcaattgttgtaaatgctgctgtgcttgcggggagcgttttgtcccttcagcttcaaacaagtgatgccactgttgcagcgcgttactgctgttcggtaagccagccataaccctgctcctccagttgtttgaccaacgtgaaatcgccggatttcacaattcgtccctgatatagcacatgaacgtaatcaggcttgatgtagtcgagaatgcgttggtagtgcgtaacaatgatgaaactgcgcttgccatcacgcaggctgttcacgccatcggcgaccacttttaatgcgtcaatatccagcccggagtcgctctcatcaagaatgcataactccggttccagcaccgccatttgcaaaatatcgttgcgctttttctcgccgccggaaaaaccaacgtttacgctacgggttaataaatcttccggcatcttcaggagagcgattttctcttccatcaaatcctgaaaatcaaagcggtcgagcgtttcctggccgcgatagctgcgcaccgcattaagtgccgtttgcaggaaaaactggttactgacacctggaatctccaccggatactggaaggccataaagatgccttcgcccgcgcgatcttccgggctcagcgcaagcaaatctttgcctttgaactcaaccgtgccgcccgtcacttcataatcttctcgcccggcaagcgttgcgcttaaggtacttttgccgctaccgtttggccccataatggcgtgaacttcgccgggatgaacgtcgaggcttaatccgcgcaggatagctttatcttccacgctgacgtgtaaatctttaatacttaacatgtttattccttatccgacgctgtgttcaagactgatggcgaggagtttttgtgcttcaacggcaaattccaacggcagctcgctgaacacgtctttgcagaaaccgttaacaatcatgctgatggcgtcttcttcgctgatcccgcgttgcaggcagtaaaacagttgatcttcaccaatacgacttgtcgttgcctcgtgttccagttgcgcactattgttacgacactcaacatacgggaaggtatgcgccccacaattagcgccaatcagcatactgtcgcactgagtgaaattgcgcgcattggttgccgtcggcatgattttcactaagccgcgataactgttctgactatgtccggcagagatccctttgctgataatggtgcttttggtgtttttaccgatgtggatcatcttggtgccggtatccgcttgctgatgaccgctggtcagcgccacactgtaaaactcaccaatggagttatcgccgcgcaaaatgcagctgggatatttccacgtaatcgcactcccggtttcactttgcgtccaactcattttgctgttttcgccttcgcacaaagcacgcttggtgacgaagttgagaataccgccggtgttgttatcgccaggaaaccagttttgtaccgtggaatatttcacctcggcgtttttatggatgatgacttccaccactgccgcgtgtaactgatagctgtcacgcaccggagcggaacagccttcaatgtagctgacgtagctgtcttcgtcggccaccagaatggtgcgctcaaactgcccggttttttctgcgttaatgcgaaaataggtggaaagttccatcgggcagcgcacgcctttaggcacataaataaacgtaccatcagaggctaccgccgcattaagcgcggcaaagaagttgtcattccccggcaccacggtgccgagatatttacgcaccagttccgggtgatcgtggatcgcctcaccaaaggaacagaaaataattccctgctccgccagtttttcgcgataagtagtggcaacgctaacactgtcgaaaatggcatccaccgccacctctttgccttcccgcacgggaacgcccaactgctcaaacgccgcctccacctctttacttaaaaaggcgttcgcgccagtttgctgcaccgcgccaggttcagacgcgcaagtgtcgtcacaattaccgcagcttggtgcactgtagtagctgtaatcctgataattcagcttgtcgtagtgcgctttcaaccagtgcggttcttccatctccagccatgcgcgataggcgtttagacgaaactccagcatccactccggctcattacgcttcgcgctaattgcgcgcaccacctcttcgtttatcccctttgccagctcatcggtggctaactgggtgaagaatccttctttataattcagcgggccgccggtccaggttttgacatcgtcagttgcttcagtattacgagacatagtaccgcttataccccaaagctttcgccacagccacattcattctgggctttagggttgtgaaatttgaatatctgattaagtccttcacgaacgaaatcgacttccgtgccatcaataaacggcatcgcttgcagcgggacaaacagcttcgcgccgtcgtgttcaaacagcagatcgtctttgtccggctcgctaacactgtcgagcacatagccaaagcccgcgcagcccgtttgcttcacgcctaagcgcacgccgaccatacccggctgctttgccaccagctcacggatgtgtatcgccgctgcgggtgtcagcgttaagccttgccaggcgaaatcttgtgggttaaaggttccactatgcatgtccatcgatttacctcacttcatcgctttcagcgtataacagcatgttagtgataatgattatcagttcaacccagcaaacgcaggggctttaccgtaaaacatgctttttgcctgcttttaataagcatagaccctgatgtgtgggttaacaggcacgctaagaattaggtatctcattgttagataatggttattatctaaggagcattaaggctgtgatgaaaaagaaaaagttgtattgaaaatgactatttaagagataggtaaaaaagtgcagcgttcagaaataagaaaacccttaagtctgtgcgacacaggcttaagggtttctaccccatccggcgcttatctccggcactctcagtggcttagctcttgaaggggcgataagaataatctcataaagctaacccgccgttttaacacaaactgcgattagtattatttttgaacaatatcaggcggtagataagcagtattaagaaggtcatcgaacctggacggaggttaatccaggtcgatttggcgaacttgcggcattaagtcaggatcaatgcacgcccagacgccaggcaaagtagatttcttcttttaattcagcagaagagagagtaagcaggtcagcaaattcaagttctagttgtttcagacgtttgagatattgggcaggactaagattgctctggtcacggcgtaaaaattcaatggccagctgggtgggatcaagttgagtagacatagcatcctcgcttttagacaagacctgcacagtataccaccgtttactgtgcagataatgaccaaaagcaatatgcgtcacacttttctggtgacaacgtcacaaaatggcggtcgtcaatcgactgctacagcacaaacgccctttctcatcgaagatttcaatctgccagacctggtgacggctaccgagatgcaacggtttgcatacgccgcgcacccgcccttctcgtgcgctgcggacgtggttagcattgatttccagaccaaccactttttgctcaccttcggtacataaataaccggcaacggaaccgatactttcggccagtaccacggatgctcctccatgcagcaacccgaaaggctgctttgtccggctgtctactggcattgtcgcttcaagggtgtcatcaccaatatgttcaaagcgaatatccaggaaccccaccatgtttccttcacccatagcattcagtgcttccagggtgattttccgtttccatatcatttaataatctccagtaaagcctgcacaggatggcgtacccccgtgccttcaacccgttttacctggctacggcaggaatatccggtcgccagacagcggttacgcggcagtcgctgcatagcctgatgccaggataactcatagatcccgaggctattttcatggtttttcgcttcatgtccgtaagtccctgccatgccgcagcaacccacgctgacattttccagtttcgcgccaaaacgggcaaatatcgcggcccattgtgctggcgcacccggcaaggcggtaacttcggtacagtgaccaaagaaataccaactttcaccgctgactgtagccactggctgactctcaagtgcgcttgccagccattcattcgccagtaagacgttaaactcgccacgctcctcgcccagcgccagtttatattcatcgcgataacaaagtaccagcgccggatcgacgcccaccattggcatacccagcttcgccatacggttgaggaaatccgccgtctttttcgccgtcttcgcaaaacgattaagaaaacctttaatatgctgggctttgccatttgggctaaatggcagtaacacaggctggaaacctaatttttcgaccagacggacaaaatccgccaccacttgcgcatcgtaatagctggtaaaggggtcctgcaccaccaacactgtgcgcgctttctgctctgcattgagagattcaagctgttccagcgtcatgtttgcgctgcgatgccccaccatttgttgttgtaggctggggacgctcagcagcggcaaatcaaccatgccgatatgtttttcgctgagtttgcgcaccagcggctggttaatgaagaagttaaaggttttcggcgcgcgtgccatcagcggcgcgtagctctcgaccgtagcgacgaggtggtcgcgcagcgggcgtaaataacgggtgtgatagagctgcagaaaacgagagcgaaactccggcacatcaattttgatggggcactgggtgctacacgctttacaggccagacagccgctcatcgcctctttgacttcgtgactgaagtcatattcgcctttattcgcatgccagctattgcgcgtgcgggcaattaacgtccgcaaactgacgccggattcaggcagttcttgttccagtttgagtggatcaacgccgcgatccgccaacaaacgcagccattcacgcaccagcgttgcgcgccctttcggactatgaatccggttctgggtgatcttcatgctcggacacatcggactacgggcatcaaagttgaagcataaaccgttgccgttacactccatcgcaccgcgccactgctggcgtaccgcaatggggatctgccgatcgaatgtaccgcgcttcaccgcgtccactttcatcatcggcgcatcgagaccttctggcgggcaaatcttccctgggttgagtcggttatgcgggtcaaatgccgctttcactttgcgcagttctgcaaaaagttcctcaccgaaaaacgccgggctgtattcagcgcgaaaacctttgccgtgctcgccccacaacaaaccaccgtatttcgcagtcagcgccaccacgtcatcagagatttgcttcatcaaaatctcttgttgaggatcgcacatatccagcgctggacggacgtgcaagacacctgcgtcgacgtgaccgaacataccgtagcttaagccgtggctgtcgagcagcgcgcgaaattcagcaatataatccgccaggtgttccggcggtacgcaggtatcctcagcaaacggaattggcttagcggcacctttggcattgccaagcagaccaacggcttttttgcgcattgcatagatacgttcaacccccgccagctcacggcacacctgccagccgatgacacctgcttgatgactggcgatcagctcatccaaccgcgcacagagtgcatttacccgctcatcaatcagcgcctcatcatcaccagcaaattccacaatgttcagcccgagcatctcttggtcaggcacatcggtaatcaactcgctgacggaatgccagacaatatcttcccgcgccagattcagcactttactgtccaccgtctctacgctaagcgcccgcgcctcaaccataaacggcgcgttacgcagcgcagagtcaaaagagtcatatttgacgttcaccagacggcgcactttaggcaagcgtgtaatatccagccgcgcttcggtaataaaggccagcgtcccttcactacccgtcagaatgcgcgtcaggtcgaactcggtcatctcatcgttaaagacatgacgcagatcgtaaccggtaagaaagcggttaagtttggggaagttgtcgataattaactggcgttgctgacggcaacgttgataaaccgtgttataaattcgcccgattgtggtattggatttacccagcgtttccgccaattcgacgggtaaaggttgcgtatcgagaatatcgccccccaacaacaccgcgcgtacgccaagtacgtgatcactcgttttgccatagaccaggcttccctgaccggatgcatcggtattgatcatcccaccgagcgttgcccggttgctggtgctaagttccggcgcaaaaaagtagccgaacggtttcaggtactgattgagttgatcttttatcaccccggcctcaacgcgcacccagccctcttcagggttaatttcgatgatgcggttcatatggcgggacatatcaacaataatcccctggttgagcgcctgaccgttagtgccggtgccgccgccgcggggggtaaagatcaggctactatagcgttcctgcgcggcaagacgggcgatcagcgccacatctgcggtactacgcggaaataccaccgcatcggggagaagttggtaaatactgttgtcggtgctcattgtcagacgatcggcataacttgtcgccgtatcgccggtaaaaccttgttgctccagctcttgcaaaaaattaagcaccagttgaacgacgccgggtgcctgggaaatctgtggaatcattatattgaccctttcctgcggtctgtgatgtaggtcgatacactattctttcaggctgctgcaatagcgcactgaaaggtgatgtttgtttactctatggatttcgtgttgcaggaaggcggcaagcgagtgaactccaggagcttacaatagtaagtgactggggtgaacgaacgtagccgcagcacatgcaacttgaaatacgacgagtaaatcgtttgcgtgttgcctgagttgttgtaccacatttttttctaacacgcccatcagaattaagggcagaatcggcctgttaaaaaccgctgaaattgctcatcattatgcaggtgagtttcgcgtgttcacgtcgcgtcgacgatttgacgcacaaaaaaggtgaaaagtagttatggtaaatgttcgtcagcccagggatgtcgcacaaattctgcttagcgtgctgtttttagccatcatgattgtggcatgtctgtggattgttcaaccctttattctcggctttgcatgggccggtacggtggttatcgccacctggccggtattgttacgtttgcaaaagatcatgtttggccgccgctctctcgccgttctggtgatgacgctgttattagtgatggtgtttatcatccctattgctttgctggttaacagtatcgtcgacggcagcggcccgctaattaaagccatttccagcggtgacatgacgttacccgatctggcgtggcttaataccattccggtgattggcgcgaagctgtatgcaggctggcacaacttgctggatatgggggggacggcgatcatggcgaaagtccgcccttatattggcaccaccaccacctggttcgttgggcaggcggcgcatatcgggcgctttatggtgcattgtgcgctgatgcttctcttcagtgccctgctgtactggcgcggtgaacaggtggcacaaggcattcgccattttgcaacccgtctggcaggcgttcgcggagatgccgccgtgctgctggcggcacaggctatccgcgcggtggcgctgggtgtggtggtgacggcgttagtacaggcagtgcttggcggtatcggcctcgccgtatccggcgtaccttatgcaacgttgctaacggtgttaatgatcctctcctgccttgtccagcttggcccgttgccggtactgattccggcgattatctggctctactggactggcgataccacctggggaacggtattgttagtgtggagcggtgtggttggcacgctggataacgtcatccgcccaatgttaattcgcatgggtgccgatttaccgctgatcctgattctctctggcgttattggtggtttgattgctttcgggatgatcggtctgtttattggtccggttctgttagccgtttcctggcgtctgtttgccgcgtgggtggaagaagtcccgccgccgacggaccaaccggaagaaattctcgaagaacttggcgaaatcgagaaaccgaataagtaatttctcatcaggcggctctgccgcctgattgttaaccaccgctaattgatatttgcttgctcttccccatattttcctgcttaccgccattcagctggtagtacctgtcgcaaattctttacagtttttaaactaatgagacgaatctgatcgacgcaaaaagtccgtatgcctactattagctcacggttataaatcaacatattgatttataagcatggaaatcccctgagtgaaacaacgaattgctgtgtgtagtctttgcccatctcccacgatgggcttttttttaacatttttccgcttcgctacctcgcccctcactctttccaataatgttgcacaagatactgtgactctcttcaagccgtcagcaggctgataatgttatttatattttattgtttatttcatgcagccattacacgatgaacgcttatgaactccaggcactccgccatatttttgccatgactattgatgaatgcgcgacctggattgcccagaccggtgacagtgaaagctggcgtcagtgggaaaatggcaagtgtgccattcctgatcgtgtagtcgagcaactgttggctatgcgtcagcaaagaaaaaaacatcttcatgccatcatagagaaaataaataaccgcatcggcaacaacaccatgcgttttttccccgacttaaccgcatttcaacgagtctaccctgatggcaattttattgactggaagatctatcaaagcgtagctgctgaattatatgcacacgatctggagcggctttgttaatttttccacagaaaggaattgtcgttgttacaacaataatgaacggatgctgacacaacatcgcttcactttttaaagcacctttgctaagtagaacctatgaaaaatccctatttccctaccgcacttgggttgtattttaattacctggtgcatggtatgggcgtccttttgatgagcctgaatatggccagcctggagacactttggcagactaatgccgcgggtgtcagcatagttatcagtagcctgggcattggtcgattaagtgtcttgctttttgcaggattattatccgatcgctttggtcgccgcccttttatcatgctcgggatgtgctgctatatggccttcttttttggcatcctgcagaccaataacatcattatcgcttatgtttttggctttctggcgggaatggcaaacagttttctcgatgcaggcacttatcccagtttgatggaagcttttccacgcagtcctgggacagccaatattttaattaaagcatttgtttccagcggacaatttttattaccgctaatcattagcctgttagtgtgggctgaactgtggttcggttggtcctttatgattgctgcaggcattatgtttattaacgctctgtttttataccgttgtacgttcccaccccatccgggtcgtcgcttacctgtcataaagaaaaccaccagctctacggaacatcgctgtagtattatcgatttagccagttataccttatatggctatatcagtatggcaacgttttatctggttagccagtggctggcacagtacggacaatttgttgcaggcatgagttacactatgagcatcaaactactcagtatctacaccgtgggtagcctgctttgtgtatttattaccgctccactcattcgtaataccgttcgcccaacaacattactgatgctgtacacctttatcagttttattgctctgtttaccgtctgcctgcatcccacattttatgtggtgataatatttgcttttgtcattggttttacctctgctggaggtgttgtgcaaattggcctgacgttaatggctgaacgtttcccttacgctaaaggtaaagctacagggatctattacagtgcgggcagtattgcgacctttactattccgttgattacggctcatctgtcccaaagaagtattgccgatattatgtggttcgataccgccatcgctgccatcggttttttactggcactgtttatcggcttacgcagccgcaaaaaaacgcggcatcacagcctaaaggaaaatgtcgctccgggtgggtaatgcaatattcttttcaggtcatgcaagatcttacggataaataactctttctgcgctaactaaggaaaatcgcgatcaaaaacaaactatgacatgcaatattcctggaaacataaactttatgccatgtacccagggaaaatcatcttcagtatagtaattatgtaaaccgtcggagaacaatacgtacggtaacgaaattatctttcagcaaggagctgtgaaaatgtctcaaaataaggctttcagcacgccatttatcctggctgttctttgtatttacttcagctacttcctgcacggcattagtgttattacgcttgcccaaaatatgagttctctggcggaaaagttttccactgacaacgcgggcattgcctacttaatttccggtatcggtttggggcgattgatcagtattttattcttcggtgtgatctccgataagtttggtcgtcgggcggtgatattaatggcagtaataatgtatctgctattcttctttggtattcccgcttgcccgaatttaactctcgcctacggtctggcagtgtgcgtaggtatcgctaacagtgcgctggatacgggtggctaccccgcgctcatggaatgctttccgaaagcctctggtagcgcggtcatactggttaaagcgatggtgagttttgggcaaatgttctacccaatgctggtgagctatatgttgctcaataatatctggtacggctatgggctgattattccgggtattctatttgtactgatcacgctgatgctgttgaaaagcaaattccccagccagttggtgggcgccagcgtaactaatgaattaccgcaaatgaacagcaaaccgttagtctggctggaaggtgttagtagcgtactgttcggtgtagccgcattcagcaccttttatgtgattgtggtgtggatgcccaaatatgcgatggcttttgctggtatgagtgaagctgaggcattaaaaaccatctcttattacagtatgggcagcttggtctgtgtctttatttttgccgcactactgaaaaaaatggtccggcccatctgggctaatgtatttaactctgcactggcaacaataacagcagccattatctacctgtacccttctccactggtgtgcaatgccggagcctttgttatcggtttcagtgcagctggcggcattttacagctcggcgttagcgtcatgagtgagttttttcccaaaagcaaagccaaagtcaccagtatttatatgatgatgggtggactggctaactttgttattccactgattaccggttatctgagcaacatcggcctgcaatatatcattgttctcgattttactttcgcgctgctggccctgattaccgcaattattgtttttatccgctattaccgcgttttcattattcctgaaaatgatgtgcggtttggcgagcgtaaattttgcacccggttaaacacaattaagcatagaggttaaaggagttaattatggatgttaccgcaaaatacgaattgattgggttgatggcctatcctatccgccacagtttaagccccgaaatgcagaataaagccttagaaaaagcgggattgccatttacctatatggccttcgaagtggataacgatagctttcctggagcaattgaaggattaaaagccctcaaaatgcgcggaactggtgtaagcatgccgaacaaacaactggcgtgtgaatatgttgatgaattaacaccagctgccaaactggtgggggccatcaacaccatcgttaatgatgatggctatctgcgtggctataacaccgacggcacgggccatattcgcgccattaaagagagcggttttgatatcaaaggcaaaacgatggtgctgttaggggccggtggtgccagtacggcaattggcgcgcagggggcaattgaaggtttaaaagaaattaaactctttaaccgtcgggatgagttcttcgataaagccctcgccttcgcgcagcgggttaatgaaaacaccgattgtgtcgtcacggtcaccgatctcgccgatcagcaagcctttgctgaagccctggcttccgccgacattttaaccaatggcacaaaagtgggtatgaaaccccttgagaatgaaagtttggttaatgatatcagtctgttacatccgggacttctggtcactgaatgcgtgtataacccgcatatgacgaagttattgcagcaggcgcaacaagctggttgcaaaacgattgatggatacggcatgttgttgtggcaaggggctgaacagttcacattatggactggcaaagatttccctctggaatatgttaaacaggtcatggggttcggtgcctgacaggctgaccgcgtgcagaaagggtaaaaaatgaaaaccgtaactgtaaaagatctcgtcattggtacgggcgcacctaaaatcatcgtcagcctgatggcgaaagatatcgccagcgtgaaatccgaagctctcgcctatcgtgaagcggactttgatattctggaatggcgtgtggaccactatgccgacctctccaatgtggagtctgtcatggcggcagcaaaaattctccgtgagaccatgccagaaaaaccgctgctgtttaccttccgcagtgccaaagaaggcggcgagcaggcgatttccaccgaggcttatattgcactcaatcgtgcagccatcgacagcggcctggttgatatgatcgatctggagttatttaccggtgatgatcaggttaaagaaaccgtcgcctacgcccacgcgcatgatgtgaaagtagtcatgtccaaccatgacttccataaaacgccggaagccgaagaaatcattgcccgtctgcgcaaaatgcaatccttcgacgccgatattcctaagattgcgctgatgccgcaaagtaccagcgatgtgctgacgttgcttgccgcgaccctggagatgcaggagcagtatgccgatcgtccaattatcacgatgagcatggcaaaaactggcgtaatttctcgtctggctggtgaagtatttggcagcgcggcaacttttggtgcggtaaaaaaagcgtctgcgccagggcaaatcagcgtaaatgatttgcgcacggtattaactattttacaccaggcataagcaataatatttcggcgggaacaccctccccgccgaactaaaaaatatattcaatcgtatttaataaaaatatttcgtgagtctctgtgcgctaattctccatttggcgtagggaaaatcacatctgaatcaggaattaacaatgaaacctgtaaaaccacctcgtattaatggacgagtgccggtcctgagcgcacaggaagcggtgaattatattcccgacgaagcaacactttgtgtgttaggcgctggcggcggtattctggaagccaccacgttaattactgctcttgctgataaatataaacagactcaaacaccacgtaatttaagcattattagtccaacagggcttggcgatcgcgccgaccgtggtattagtcctctggcgcaagaaggtctggtgaaatgggcattatgtggtcactggggacaaagcccgcgtatttctgaactcgcagaacaaaataaaattattgcttataactacccacaaggtgtacttacacaaaccttacgcgccgccgcagcccaccagcctggtattattagtgatattggcatcgggacatttgtcgatccacgccagcaaggcggcaaactgaatgaagtcactaaagaagacctgattaaactggtcgagtttgataacaaagaatatctctattacaaagcgattgcgccagatattgccttcattcgcgctaccacctgcgacagtgaaggctacgccacttttgaagatgaggtgatgtatctcgacgcattggttattgcccaggcggtgcacaataacggcggtattgtgatgatgcaggtgcagaaaatggttaagaaagccacgctgcatcctaaatctgtccgtattccgggttatctggtggatattgtggtggtcgatccggatcaaacccaactgtatggcggtgcaccggttaaccgctttatttctggtgacttcacccttgatgacagtaccaaacttagcctgcccctaaaccaacgtaaattagttgcgcggcgcgcattattcgaaatgcgtaaaggcgcggtggggaatgtcggcgtcggtattgctgacggcattggcctggtcgcccgagaagaaggttgtgctgatgactttattctgacggtagaaacaggtccgattggcggaattactagtcaggggatcgcctttggcgcgaacgtgaatacccgtgccattctggatatgacgtcccagtttgatttttatcacggtggcggtctggatgtttgttatttgagttttgctgaagtcgaccagcacggtaacgtcggcgtgcataaattcaatggtaaaatcatgggcaccggtggatttattgatatcagtgccactagcaagaaaatcattttctgcggcacattaactgcgggcagtttaaaaacagaaattaccgacggcaaattaaatatcgtccaggaaggacgggtgaagaaatttattcgggaactaccggaaattactttcagcggaaaaatcgctctcgagcgagggctggatgttcgttatatcactgagcgcgcagtattcacgctgaaagaagacggcctgcatttaatcgaaatcgcccctggcgtcgatttacaaaaagatattctcgacaaaatggatttcaccccagtgattagcccagaactcaaactgatggacgaaagattatttatcgatgcggcgatgggctttgtcctgcctgaagcggctcattaacaggagtataatgatggatttttctttaactgaagaacaagaactgctgctggccagtattcgcgaactgattacgactaactttccggaagagtatttccgcacctgcgatcaaaacgggacatatccgcgtgagtttatgcgggcgctggcggataacggtatttccatgcttggcgtgccggaagaatttggtggtatccctgcggattacgtcacccaaatgctggcgctgatggaagtgagtaaatgcggtgctccggcatttttaattaccaacggtcaatgtattcacagtatgcgccgtttcggttctgcagagcagctacgtaaaacggcagagagcaccctggaaacgggtgatcccgcctatgccctggcgttgacggaaccaggtgctggcagtgataacaacagtgccactaccacttacacgcgtaaaaacggcaaggtctacatcaacggacaaaaaacctttattaccggtgcgaaagagtacccgtatatgctggtgctggcgcgcgatccgcaaccgaaagatcccaaaaaagccttcaccctgtggtgggtcgactccagtaagcccggcattaagattaacccgctgcataaaatcggctggcatatgctcagcacctgcgaagtctatctcgacaacgtggaggttgaagagagcgacatggtgggcgaagaaggaatgggtttcctcaatgtgatgtacaactttgagatggagcgcctgatcaacgccgcgcgcagcaccggctttgccgaatgcgcctttgaagatgccgcccgctatgccaaccaacgtatcgcttttggtaagcccattggtcataaccagatgatccaggaaaaactggcgctgatggcgattaagatcgacaacatgcgcaacatggtgctgaaagtggcatggcaagccgatcagcatcagagtctgcgcaccagcgcggcgctggcaaaactgtactgtgcacgtaccgcaatggaagtcattgatgatgcgattcaaatcatgggcggtctgggctataccgatgaggcgcgcgtctcccgcttctggcgtgatgtccgttgtgaacgtatcggcggcggtacagacgaaattatgatttacgtagcaggtcggcagatcctgaaagactatcagaacaaataatctgcaggcggcgcagcttcttaacaaactgcgccgccagatttatccaacaagacttaccggttgaggaaattcagataggatttcttgttccgcaaaacagtttttaaattgtctacggtaatcgctggggctacaaccgacatggcgcaaaaacagtttggcaaagtgatcgacattttcataacccacacgccaggagatctctgcctgacttaattcagtattagtgagactccattttgcttccgtcatacgccgttgaataacatagttaataggggaaatacgatactctttggtaaattcatggcaaatataactgacgctggcacgaaattttttgcttaactgttctaaagtgattttttcgcgataattattattcagatagaaaagaatatcttttatcagaacatcttttttaatatacccctgctcgctacgataagcatttttaaaattttcgtagtaaagaatggctaacgtataggcaaatgcatcccataagctagatgtttggctatttttactttgcggcaaaatcacacttagctcattaaataaggtttttatgacttcttttccctgccccgcggcaattaccggacaagaatgcggttgcagtagctgattttcctcagccccctgaaactgaaagccgtacagcgcacaggtacacgtcgttgccggatcgttaacgtcagaggccaccgcatgcagcctgccgcgttctatcaccacaatgtcatccgcatgtgcgacatataagctagaatcgatggtaaaccttgcaacccctttcttgacgtaaatcaactcggtttcattgtcatgaacgtgatgtccggactcccattttggatcatcgctaaatgcaaaacgactaagccgtggcgttttaccggcgacaaacagcgtttcactggcgttatcaaaacagcgttgatacatgacaacctccctattccatgagcaagcaaaaacaatatatgccggataaaatacggcgtgtattgcggttatacaaccgcgtttagcgagagctaaacaagattatttacactgaatgcaagattgtacggtcatggaataactatattgccgcaaattgcacttttgttttagcgatcgcattttttttgcaagattgttggcaaggaaaacagcttgctccgtcgaaaaccccgcaccgctatcgcacactattttcaggccatttttaccttccatcggagatggttccgtatgcgactcacaggagaaatcatgaaaataataacctgctttaagctggtgcctgaagaacaggacattgttgtcactccagaatacaccctgaatttcgacaatgccgacgccaaaatcagccagttcgatctcaatgccattgaagctgcaagccagctcgcaacagatgacgatgagatagccgcgctgaccgttggcggcagtttgttgcagaacagcaaagtgcgcaaagacgtgctatcccgcgggccgcacagcctgtatttggtgcaggatgcgcaacttgaacatgcactgcctctcgataccgcaaaagcgctggcggcagcaattgaaaagatcggcttcgatttactgatctttggtgaaggttccggcgacctttatgcccagcaggttggcttgctggtcggagaaattctgcaacttccggtgattaatgcagtgagtgctattcagcgtcagggcaatacactggtgattgaacgcacgcttgaagatgatgttgaagttattgaactctctgttccagccgtgctctgcgtcacctccgatattaacgtgccacgcattcctagcatgaaagccattctcggcgcgggtaaaaaaccggtaaatcagtggcaggcaagtgatattgactggagccagagcgcgccacttgctgaactggtcggcattcgcgtaccgccgcaaacagaacgtaagcacatcattatcgataacgatagcccggaggccattgccgagctggcggaacatctgaagaaagccctgaactgaagcctacggagaagaaacgatgagtcaattaaacagcgtctgggtctttagcgataatcctgaacgttatgctgaactgtttggcggcgctcagcaatggggccaacaggtgtatgccattgtacaaaataccgaccaggcgcaggcagttatgccttatggtccaaaatgtctttatgttcttgcgcaaaacgacgcgctgcaacgcactgaaaattacgccgaaagcattgctgccctgctgaaagataaacaccccgctatgttgctgttggccgcgacgaaacgtggtaaagcgctggcagcacggttaagtgtgcaactgaatgcggcgctggtgaacgatgccacggcggtggatattgtcgatggtcacatttgcgccgaacaccggatgtatggcgggttagcgttcgctcaggaaaagatcaacagcccgctggcgatcattacccttgcacccggtgttcaggaaccgtgcaccagtgatacctctcatcagtgcccgacagaaacggtaccttatgttgctccgcgtcatgaaattctctgtcgcgaacgccgtgcgaaagccgcaagcagcgtggacctgagcaaagcaaaacgtgtggttggcgtcggtcgtggactggcggcgcaggatgacctaaaaatggtccacgaactggcggcggtgctgaatgctgaagtcggctgtagtcgtccaattgccgaaggcgagaactggatggagcgtgaacgttatatcggtgtctccggcgtgttgctgaaatccgatctctacctgacgctggggatctccgggcagatccagcatatggttggcggcaacggcgcaaaagtgattgtcgccatcaataaagataaaaatgcgccaatcttcaactatgccgactacggtctggtgggcgatatctacaaagtcgtccctgccctgattagccagttgagccgctaattcccctttcaaccacatctcccgctgtaaacgcagcgggaagggagcataacgcatgagcgatgacaaatttgatgccattgtggtcggtgcgggcgttgctggtagcgttgccgcactggtcatggcacgagccgggctggatgtcctggtgatagaacgcggcgacagtgccggatgtaaaaacatgaccggcgggcgtctttatgcccacacacttgaagcaatcattccaggctttgcagtaagtgcgccggtagaacgcaaggtcacacgcgagaaaatctccttcttaaccgaagaaagcgccgttaccctcgattttcaccgcgagcagccagatgttccgcaacacgcatcttataccgtattgcgtaatcgtctggacccgtggttgatggaacaagccgagcaggcgggcgcgcagtttatcccaggcgttcgcgtcgacgcgctggttcgtgaaggaaacaaggtcactggcgtgcaggctggggatgatattctcgaagcgaatgtggtgattctggctgatggcgttaacagcatgcttggccgcagcctgggaatggttcccgcttccgatccgcatcattacgctgttggtgttaaagaggttattggcctcacaccagaacagatcaacgatcgctttaatattacgggcgaggaaggtgccgcctggctgtttgccggttccccttctgacggcctgatgggcgggggatttctctataccaacaaggattccatatccttggggctggtttgtggattgggtgatatcgcccatgcgcaaaaaagcgtgccgcaaatgctggaagattttaaacaacaccccgccattcgcccgctgattagcggcggcaaactgcttgaatattccgcgcatatggtgccggaaggcggtctggcaatggtgccgcaactggttaacgagggcgtgatgatcgttggtgacgccgcaggcttctgcctgaatttgggttttacggtccgcggcatggatttagccatcgcaagcgctcaggctgccgccacaacggtgatcgccgccaaagaacgcgcggatttctccgccagcagtctggcgcaatacaaacgtgagctggaacaaagctgcgtcatgcgtgatatgcagcattttcgcaagatcccggcgctgatggaaaacccgcgcctgtttagccaatacccacgaatggtagccgacatcatgaacgagatgttcaccatcgacggcaaaccaaaccagccggtacgaaaaatgatcatgggacatgcgaagaaaattgggctgatcaacttgctgaaagatggcattaagggagcaaccgcgctatgagccagaacgctacggttaacgtcgacatcaaattaggcgtcaataaattccatgttgatgagggccacccgcatatcattctggcggaaaatcccgatatcaatgaattccataaattaatgaaagcctgccctgccggactttataagcaggatgacgcaggaaacattcattttgattccgccggttgtctggagtgcggcacctgtcgggtgctgtgcggtaacactattctcgaacagtggcaatatcccgcaggcaccttcggtattgattttcgctacggctaatcatgcatcccacaggcccgcatctcgggcctgatgttctgtttcgagagtccaacatgaaagtgacattaacgtttaacgaacaacgtcgtgcggcgtatcgtcagcaagggttatggggcgatgctagcctggccgattactggcagcagaccgctcgtgcgatgccagacaaaattgccgtggtcgataatcatggtgcaagctacacctatagcgcgctcgatcacgccgcgagctgtctggcaaactggatgttagcgaagggtattgaaagtggcgatcgcatcgcatttcaactgcctggctggtgtgaatttaccgttatctatcttgcctgcctgaaaatcggtgcagtttccgtgccgctgttgccttcctggcgggaagcagaactggtgtgggtgctcaataagtgtcaggcaaaaatgttctttgcaccgacgttgtttaaacaaacgcgtccggtagatttaatcctgccgctgcaaaatcagcttccacaactacaacaaattgtcggcgtggacaaactggctcccgccacctcttccctcagtttaagtcagattatcgccgacaataccagtctgaccacggcgataacgacccacggcgatgaattagctgcggtgctgtttacctccggaaccgagggtctgccaaagggcgtgatgctaacgcataacaatattctcgccagtgagcgggcttattgcgcgcgactgaatctgacctggcaggatgtctttatgatgcctgcgccacttggtcacgcaacgggctttctgcatggcgtaacggcaccattcttaattggcgctcgcagcgtgttgttagatattttcactcctgatgcgtgtctcgcgctgcttgagcagcagcgttgcacctgtatgctcggcgcaacgccgtttgtctatgatcttttgaatgtactagagaaacaacccgcggaccttagtgcgctgcgtttctttctttgcggcggaaccacaatccccaaaaaagtggcgcgtgaatgccagcagcgcggcattaaattattaagtgtttatggttccacagaaagtagcccgcatgcggtggtgaatctcgatgatcctttgagccgctttatgcacaccgatggttacgctgccgcaggtgtagagattaaagtggtcgatgacgcacgcaagaccttaccgccaggttgcgaaggtgaagaagccagccgtggcccaatgtgtttatggggtattttgatgaacctgaattaaccgcccgtgccctggatgaagaaggctggtattacagcggcgatctctgccgtatggatgaggctggctatataaaaattaccggacgcaaaaaagatattattgtccgcggcggcgaaaatattagcagccgtgaagtggaagatattttattgcagcatcctaaaattcacgatgcctgtgtggttgcaatgtccgatgaacgtttaggtgaacgaagttgcgcttatgtcgtgctgaaagcgccgcatcatagtttaagcctggaagaggtagtggctttttttagccgtaaacgggtcgcaaaatataaatatcctgaacatatcgtggtaatcgaaaaactaccgcgaactaccagtggtaaaatacaaaagtttttgttaagaaaagatattatgcggcgtttaacgcaggatgtctgtgaagagattgaataagtttcatcttcggggatcacataaccccggcgactaaacgccgccggggatttattttatttcttcagttcagccaggcttaaccaggtttgcaccacggtgtccgggttcagagacaggctatcgatcccctcttccatcaaccatgcggcaaagtcttcgtggtcggacggaccctgaccgcaaatcccgacatatttgccctgtttcttcgcggcacggatagccatgctcagcagtgctttcaccgcatcgttgcgctcatcgaacaattcagacaccacgccggagtcacggtccagaccgagcgccagctgcgtcatatcgttactgccaatactgaagccgtcgaaatattcgaggaactgctcggccagcaaggcgttggacgggatttcacacatcatgatgattttcagcccgttctcgccacgtttcagcccctgacgcgccagttcttcaaccaccgctttcgcctgatctacggtacgcacgaacgggatcatgatctcaacgttggtcagtcccatgtcgttgcgcacacgtttcactgcttcacactccagcgcgaaacagtcgcggaagctgtcggaaacatagcggcccgcgccacggaagccgagcatcgggttctcttcatctggctcgtaacgctcaccaccgaccaggttggcatattcgttgcttttaaaatcagagagacggacaatgacgcgcttcggataaaacgcggcacccagcgtcgcgatcccttcagtcagacgaccaacgtaaaattcacgcggagaatcaaaacctttcatcatctcgcggatttcgttttgcaactgcggttcctgatcgtcaaactcaagcagtgcgcgtgggtggacgccaatcatacggttgatgataaattccagacgcgcaaggcccacgccttcgttcggtaggcaggcgaagtcgaaagcacggtccgggttaccgacgttcatcatcactttcaacggcagatccggcatcgtttctacgctggagcttttcacgctaaattccagcaactccgcatagacgtaaccggtatcaccttcggcacaagaaacagtgacgttctcaccgtctttcatccgttctgttgcatctccacagcccactaccgccggaatgcccagttcacgagcgatgatcgccgcgtgacaggtacgaccgccacggttggtgacgatggcagatgctttcttcatgatcggttcccagtccgggtcggtcatgtcagtaaccagcacgtcgccaggttcgatgcggttcatttcgctgatgtcatggatgactttcaccggacccgcaccgatgcgatgaccgatagcacggccttcggcgataatcttaccctgactatgcagcgtataacgctccatgacctgaccgcgactgcgcacggtttccggacgcgcctgcacaatgaacagtttaccggtgtggccatctttcgcccactcaatatccatcgggcgaccgtagtgtttctcaatttgtacggcctgttttgccagttcctgcacttcttcgttggtcaggctgaagatgtcacgctgttcctgcggtacgtcttcgattttaacctgcttgccgtgctcctgggtcggcgcgtaaaccatgcggatttttttgctccccatggtgcggcgcacgatagccgggcgattcgccgccagtgtcggtttatgcacgtaaaactcatccgggttaaccgcaccctgcacgaccatctcaccaaggccccatgcggaagtgataaacaccacctggtcaaagccggattcggtatcaatggagaacatcacgccagaacttgcgaggtcagagcgcaccatccgttgaacaccggcggagagcgccacaccacggtgatcgtaaccctggtgcacacgataagagatggcgcgatcgttaaacagagaagcaaatacatgtttcactgccacgagaacggcgtcaaaaccctgaacgttgaggaaggtttcctgctgaccggcaaaagaagcgtccggcatatcttctgcggtggcggaggagcgcaccgcaaaagaggcgttttcgtcatcggcggaaagctgtgcataggcttcgcggatggcgttttccagctcaggctggaagggagtgtcgataatccactggcggatttgcgcgcccgctttcgcaagctgagtaacatcgtcaatatccgttttatccagcagttcataaatgcgctggtttacgccgctttggtccagaaactggttaaacgcgtcggcggttgtggcgaaaccattcggaacggaaacacccattccggaaagattagtaatcatttcacccagggaggcatttttgcccccaaccctgtctacatcattcatgccgagttggttataccaaagcaccagcggactgctgccattgttggacatcgaacaatccttttgtgataaatgaacggtttgagaaacacatttctgcgcatttatctttgcatatttaaccggatgaaaaaaacggtgaatcgttcaagcaaatatatttttttactttttaagactgatcccagcgttgcgcaaatctgctctcttcgacaatttccacataaaccatcggtataaacgaaaccataaaaatgaaatgctgttttcataaaaaataaaattgaaggttcattttataaaccagacataacgttctacgcttctgtgcgtttttaatttatgctttcatagaattatgtctgcatcacgggaagaacaaaatggataatgctgttgatcgccacgttttttatatttctgatggtacggcaataactgcggaggtattaggacacgcagtaatgagtcaatttcccgtcactatcagcagcatcacgctgccgtttgtcgaaaatgagagccgtgcacgggcagtgaaggatcagattgacgcaatttatcaccagacaggcgtgcgcccgctggtcttctactccatcgtgttgccggagattcgcgccatcatcttgcaaagtgaaggcttttgccaggatatcgttcaggcgctggttgccccgctacaacaagagatgaaactggatccaacgccgattgctcatcgtacccatggccttaaccctaataatctcaataaatatgatgcgcgcattgcggcgattgattacaccctcgcccacgatgacggcattagcttgcgcaatctggaccaggctcaggtgatcctgctcggtgtttctcgctgtggtaaaacccccaccagtctgtatctggcaatgcagtttggtatccgcgcggcaaactacccctttattgccgacgatatggataatctggtgctacccgcgagcctcaaaccgcttcagcataaattgttcggcctgactatcgacccggaacgtctggcggcgattcgcgaggaacgtcgggagaacagtcgctatgccagccttcgtcagtgcaggatggaagtcgcggaagtggaagccttgtaccgtaaaaatcagatcccgtggattaacagtaccaattatagcgtagaagagattgccaccaagatcctcgatatcatgggccttagtcgccgaatgtactaaagaactagtgcattagcttatttttttgttatcatgctaaccacccggcgaggtgtgacacacctcgcacttgaaatcagcagcgattggtttatcgtgatgcgcatcacttcccggcagtcctgccgtagaagcaacaaatttctgagacttgtaatgaacagaactgacgaactccgtactgcgcgtattgagagcctggtaacgcccgccgaactcgcgctacggtatcccgtaacgcctggcgtcgccacccatgtcaccgactcccgccgcagaattgaaaaaatactgaatggtgaagataagcgactgttggtcattattggcccctgcagcatccacgatctcaccgctgcaatggagtacgccacccgtctgcagagcctgcgcaaccagtaccagagtcggctggaaatcgtaatgcgcacctattttgaaaaaccacgaactgttgtcggctggaaaggactaatctccgatccagatttaaacggcagctatcgggtaaatcacggtctggagctggcgcgcaaattacttttacaggtaaatgagctgggcgtcccaaccgcgaccgagttcctcgatatggtgaccggtcagtttattgctgatttaatcagttggggcgcgattggcgcacgtactaccgaaagtcagatccaccgcgaaatggctagcgcactctcctgtccggtaggtttttaaaatggtaccgatggcaatacgcggattgctgtggatgctatccgcgcagcccgcgccagccatatgttcctcagcccagacaaaaatggtcagatgaccatctatcagaccagcggcaacccgtatggccacattattatgcgtggcggcaaaaaaccgaattatcatgccgatgatatcgccgcagcctgcgatacgctgcacgagtttgatttacctgaacatctggtggtggatttcagccacggtaactgccagaagcagcaccgtcgccagttagaagtttgtgaggatatttgtcagcaaatccgcaatggctctacggcgattgctggaattatggcggaaagtttcctgcgcgaaggaacgcaaaaaatcgtcggcagtcagccgctcacttacggtcaatccattaccgacccgtgtctgggctgggaggataccgaacgcctggtcgaaaaactcgcctctgcggtagatacccgcttctgaatgcgtgcccattcctgacggaatgggcatttctgcgcaacttgttgtcttctcaacaaattactgcttgctctggtcagccataatattgataataagaatcattgttatatcaattattattaatttttatgcgttatacggatagcagaaaactcacgcctgaaacggatgccaatcacaagaccgcttccccgcagcctattcggcgaatttccagccagacactgttaggtccggatggcaaactgattatcgatcatgacgggcaagaatatctgctccgtaaaactcaggctggcaagctgctgttgaccaagtaacctttaactgctgcagctgacttccagccgtttaccccagtcaggtggacgactgacatagtcatcatctctgtcgctgaaaggatttcgcaacgcctcatgcaggcggtgcaattccgtcatatcacccttttctgccgcttcaatcgcccgttgcgccaaccagttgcgcaataccagagcggggttaacgctttgcatcagttgctgacgctcactatcgctaacctcgtcttgttgcaaacgcccccgataacgggcaaaccagtcatcaaatgccgcacgatcaataaactcatcacgtagcggactcgccgcgctgtgctgctcggtcagactcagcatgcggaatgtgcgggtataatcgctgcgctctcgcgccatcagactgaataattcattcagtagcgcgttatcctctttttgctccgtcatgaagcccagtttctgccgcatccgttctccataatgcgtcaacaaaacctgctgatagctgtccagggcctcattcagggcatctacggcaacaaatgggctcaatgtctgcgccagacgctgtaaattccacaacgcgacggcaggttgattatcaaagctgtaacgcccttgatgatcgctgtgattacaaataaaaccgggttcgtaatcatcaagaaaaccaaacggcccgtaatcaagcgtcagccccagcaggctcatgttgtcggtattcatcaccccatgagcaaagccgaccgtctgccattgggcaattaagctcgcggtacgtgcgacaacatcgctaaaccagagacggtatttgtcctcatcatctgcaagatgactccagtaatgacgaatagcaaagtcagctaactgacgaaccttttcgctctcgcggcggtagtaaaaatgttcgaaatgaccaaagcgcagatgacttggtgccacacgcatcagcatcgcgcctggctccgccgtttcccgatacactgggctatcgctggtgacgatacttaacgcgcgggtcgtcggaatgcccagataatgcatcgcctcactggcgagactttctcgtatcgtgctacgtaaaaccgcccgtccatcacccattcggctataaggcgtcaggccagcacctttcagatgccagtccattgtagtgccatcagcaagcagttgttcgccgagtaaaatgccgcgcccatcacccagttggcccgcccagacgccgaactgatgaccactgtaaacctgcgccagtggactcataccaggcagtagggcttcgccgccccagacacctgcgccatttttaaacaggctgcttggaatactcagcgtgttagccagttcggtattatgccaaatcagccgggcattatttaaaggcgtaggggaaagtgctgtataggtttctggcaattcatcgcgccagcgggtaacaaaagacagggtcatagatcctcctgtttgatagtgtagacggttactctcgtcttaaacaccagcaaacagaagggttatcgctgaaccaacgtcgttatctgatttatgggaacggcaggccacaggcatccctggagagcatggaaatcgaagggggtaatctgtgccaatatttctgccgtatcaatgcctcccgcaatgatgcaattgcaacaaggggaaatttgcgcctggatcgcacgaataaacggttcgaaggagcggtgcgtgatttgttgctgaataaaacttttatccagcatgacgcgggtgaaaagaccatcaaaaaccgctttcattgtgctattgcctgctcccaaattacctaacacaaggggatacacttggcttaaggataaaagaccgcgattatcttttccttcattgagatgcgggtaattctcattaatcaacagttcaataaacggatattttaatagttcgcctgcgtaattatccctctctaataataatgtagccacttgtggcgttaaattaagccaggcaaagagtttatgttgaataaaaaaatgttggcaactttttagtaattccaactgctcactaaataattgccaatgttgctcctcggtaagttgcgctataacccgactcgtcgggatacgaaccgtaccatcttcactggagaaatgggtaattaactcaacgccgacaaggacttgctggttgtctcttatcggcaggaaatagcaatcagaatgataaagattctccaaaaaaatcttcatggtaaccgtccctctcgaaggatgtttttcagtatccggctaaaagggatgaggccataagacataacaattacagaaggagtaactttcatttgttccatgttaaccactttttcaggggtcctttttttagattatcctgattataaacgaataatccatttacggaatttttgtctgcaaaatactactgtattcaggagtaaatggacggcgatgtatcatcgccgtccatttttcgacatattagattcgtctcgcctgccagaaatttttctgccaatagacattatcaagactggaacgcatcactcccttgctggtagaggcgtggataaattggttgttggtatcgtaaatacctacatgcaaaccattttgtccggaccccgttttgaaaaagaccaggtcacctggcagcaactcgtctttatcaatttgcgtgccaatagaggcttgttgtttggtttcacggggcagctgcaaatcgaaacgatcgcgcatcgtcacaaccacaaatccgctacagtccacaccgcgccgcgtcatgccaccataacgatacggcgtgccatgccagctttgtagctggtcgttcaaaccggcaataacggtaatgctatcagaaagtctggcatttggcggcggtgctttatggtggctacacccggccagaagcagtgctgtgatcaaaataaggcagaaacgcattccgtacggttcctctgttttttattcttgcattaatttagcgtcgtaattacccgattttcaagatactaatgaaatcagatggtgctaatcagcattctgtgaccttcgatatccagacggcgaaaattcatcccataggcctgcgccagatttggcggcgtgagcacctcttccctgcgtccactggccagcatttttccaccttttagcaaccacgcccgatgcgcatgacgcaatgtgtggttgagatcgtgactgctcatcacaatcgccagtccttgctgacacagcgcgctcagaattttgtctaacgcactttgttgcgcaacatcaagactgttcatcggctcatcaagaagcagcaattggcctgcgggattggcttgtggtgtgatttgcaacaccaccgcagcaagacgtacgcgttgccattcaccgccggaaagttgattggtgctacgtccgagtttgtcatcaagagccagcgcccctgcgacatcattcagtagttcggtacgcgttttatcgtgctgatgcagtgtcaggtagtgccagaccggcgttgcaaacggcggcgtctgctgttgactaagataggcgcgatgcagcgcgagttttgttgcggaccatgcttccagtggttgccccgcgaactgaatgcttcccttaccgctggtcattccggccattcgcgccagtaaggtactcttacccgcgccattcggccccaccaggtgcaggatctccccagcccgaacctcgccagaaagcggccccaggcgggtagattccgcaacatcttgtaactgcatcacaatagacattattttgccaacgccagtttaatgctttccatcacaatgggatcttccggcgtcatatccggggaaaaacgctggatgacttttccgtccctgccaaccaggaatttttcaaaattccataaaatatcatccgggtacagcggtgcacggcctttgctgaccatacgggcatagaatccgctctcttccggcgcgactgcggtcggcgctgcggcaatcaatttttgatacagcggatggcgtccttcgccattaacttcaatcttactgaacatcgggaacgtcaccccccatgtggtggtacagtaagttttaatctcttcatcgctgcccggttcttgttccagaaactggttgcacgggaatcccagcaccataaaacctcgatcgacccaggctttctgaatattctccaactgctcatattgcggcgttaagccacacttactggcgacattgacaatcaacagcacattaccggcgaacttctccagcgtggtcacttcaccgtcgatatctttcactacggtcgtcagaatggaatcttgcatcgtttctcctgggtgtggtcagtaaaaatcttagcttttaatcatagaccgtctttttgcggttaacgtcctgcttttaacaataaccagataaacaccggcgcacctaacgttgcggtgaccacgccaataggcagctctgcggcagctaatgccaggcgcgctacaatatcggccagcagcaatgcgctcgcccctgccagcgcgcagccgggaagtaatacgcgatgatcggttaaaccacacaaccggagaatatgggggatcaccagaccaataaagccgatagcacccgccagcgccacactgacgccaaccatccagccggtcgctgccaccagcacattgcgccagaaccacaggggtaaacccagttgccgcgcgctgatctcgccaagtgctaacatattcatcggcctggactgacaacagatccacaacaacacggggatcaatgccagcatcagccagctttgccgccagtctacgccgccaaaaccgcccatcatccagtacatcagctgacgcaaatcaacactggtggaaaagtagatagcccacgtcattagtgcgctacagataatccctaatgcaacgccagccagcaataaccgactggtgctaagatgacgacgggcgaaacgtaagagtattaaagtgatgataagcgcgccagcaatcgcacacagccctagcgcccagttggggagttgcccttgcccaagcaataccgcggcgataagccccacgcctgcgccgttagagacgccaagtagtccaggttctgccagaggattttcaaacaacgcctgcattacagcgccggatatagccagcgccgcaccaaccagcaatacagccagcgtacgtggcaggcgaatttgccagacgaacagttcgccacgaggagtaaaccagtcacctgggctgatccattgttcaccggcgcaaaggcttaagagaagcgccagcagcatcaaaacactcaggcataataaccagcgaatattttgtcgctgttgttggcgggcaagtgtcagcatggtatccgttctgctgaagtgtcatggcgttgattttacggtgactcttcgacagtgaaaagaaaaaaggccgcagagcggcctttttagttagatcagattactcgtctttggggctagcgttttcgacccggctttttaacttctgcccgggtctgaaggtcaccacgcgccgtgctgtaatgggaatatcctcgcccgttttcgggttacgtcccgggcgttgattcttatcacgcagatcgaagttaccaaaaccagagagtttcacctgttcgccgttttccagagcgcgacggatctcttcgaaaaacagttcaaccagttctttggcatcccgcttgctaagcccaagcttatcaaacagatattcactcatttcagcttttgtaagcgccataggttcaatccctcaaacttgcctggaatcgctcttttaatgcctctacacatttggcgacggtagcggcaatctcctcttcttcgagtgtacggctggtatcttgcaggatcaggcttatggcgaggctcttatacccctccgcaacacccttaccgcggtacacgtcaaataagtttacgccaactacctgatttacgccaactttcttacattcggataaaatatccgctgcgggaacgttttctgcgaccaccaccgcgatgtcacgacggttcgccgggaagcgagaaatctcgcgcgcctgaggcaccacgcggtctgcgagcttgttccactccagttcgaacaccagagtgcgaccgttaagatccagtttacgttccagttcaggatgaacaaccccaacaaaaccaatacgttcacctttcagataaatcgctgcggattgccccggatgcagtgccggattcgcttctgcacggaactcaacctcattcagtttaccggtcaggtcgagaacggattcaagatcgcctttcaaatcatagaaatcaacggtctcttttgccaggttccagtgctcttcgtaacggttaccgcaaatcacaccggctaacatcagatcctgacgaatgcccaacggtgcctgagtatctggtacgaaacgcagaccgctttcgaaaatgcgcacacggttctgctgacggttctggttgtacaccacggttgccagcaggccagtccacagagaaagacgcattgcactcatttcaacagagatcgggcttggcagcagtaaggcttcaacgcctggatggatcatctgctgcactttcggatcaacgaagctgtaggtgatcacttcctgatagcctttgtcgttgagcagcgttttcacgcgcttgaggctcaggtcagcttcacggtgagtacccataatcaggcttgcctgtaccggctcatccgggatgttgttgtagccgtaaacacgcgcgacttcttcaaccagatcttcttcaatctccatatcgaaacgccagctcggcgcaactgcctgccattcgtctttgccttcggtcacttcgcagccgagacgacgcagaatgtcagttacctgctcatccgcaatatgatggccgatcaggcgatccagtttgctacgacgtagagtgatggttgcacgcttcggcagcgttgcttcgttggtgatatcaattaccgggccagcctcaccaccgcagatgtcgatcagcagacgggtcgcacgttccatcgctttgtgctgcagtgccggatcaacgccacgctcataacggtgagacgcatcggtatgcaggccatgacgacgagcacgaccggtgatagacagcgggctaaagaacgcgcattccagcagcacgttttgtgtttcgtcattcacgccagagtgttcgccaccgaagatgccgcccatcgccagcgccttgttgtggtcggcgatgaccagagtgtcagcattcagcttcgcttcagtaccgtcgagcagcaccagcgtttcgccctctttcgccatccgcaccacaatgccgccttcaatgcgatctttatcgaaagcgtgcatcggctggcccagttcgagcagcacatagttggtgacgtcaacaactgcatcgatagaacggatcccgcaacgacgcagtttttctttcatccacagcggagttggcgctttaacgttaatgccttttaccacacggccaagataacgcgggcaggcttccggcgcttcgactgtaatcggcagcgtgtcgtcgatggtcgcaccaaccggaacgatttccggttgaaccagcggcagctggttcagcacggcaacgtcacgcgcaacaccaatgatgcctaagcagtcggcacggtttggcgtcacgctgatttcgatggtgttgtcatcaagtttcaggtattcacggatatcggtgccaatcggcgcatccgcaggcagttcgataatgccgctgtgatcgtcagaaatgcccagttcagagaaggagcacagcatcccttcagacggttcgccacgcagtttcgccgctttaattttgaaatcacccggcagaacagcaccaatggtcgctaccgctacacgcaggccctgacggcagtttggcgcaccgcagacgatgtccagcaggcgatcgccgccgacattcacttttgtcacacgcagtttgtcagcgttcggatgctgcgcacactcaaccacttcaccaacgaccacgccgtggaagctgccggcaaccggttctacaccgtcaacttccaggcccgccatagtgatttgatttgccagcgcatcgctatcaatcgccgggttcacccattcgcgtaaccacagttcactgaatttcataatctattcctgccttatttaaactgtttgaggaaacgcagatcgttttcgaagaaactacgcaggtcggtgacgccgtaacgcaacatagtcagacgctccatccccatcccgaaggcgaaaccagagtaaacttccgggtcgatgccaacgttacgcaacacgttcggatgcaccatcccgcagcccagcacttccagccatttaccgtttttacccatgacgtccacttctgcagaaggttcggtaaacgggaagtaggaaggacggaagcgaatctgcaaatcttcctcaaagaagttacgcaggaagtcgtgcagcgtgcctttcaggttggtaaagctgatgttggtatcaacaatcagaccttccatctgatggaacatcggcgtgtgagtctggtcgtagtcgttacgataaacacggccaggcgcgatgatacgaatcggtggctgctgggctttcatggtgcggatctgtacgccagaggtctgggtacgcagcaggcgggtagtgtcaaaccagaaagtgtcgtggtcagcgcgcgccgggtggtgaccaggaatgttcagagcatcgaagttatgataatcgtcttcgatttccggcccggttgccacggtaaagccaagctcaccgaagaaactttcgatacggtcgatggtacgggtaaccggatgcagaccgccgttttcaatgcgacgacctggcagagagacatcaatcgtttccgccgccagacgcgcattcagtgcagcgctttccagttccgctttacgcgcattcagcgcctgctgaacctgctctttcgcttcgttgataaccgcaccagctgccggacgctcttctggcggcagctcacgcagggtcgtcatctgaagggttaagtgcccttttttacccaaatattcgacgcgcacattatctaacgcggcaacatcactcgcctggctaatggccgccttcgcactggcaaccagttctgcgagatgactcatggttttcctcattgtgtcagtggtgacactggttcgttggacttagagcctatcccatcaggctattttacttgccattttggtcccgggctgtgctcgaaattctcacgtacttaaatacgctccggtttctccgcgctggccgtgtccagtctggctgcgacaattacacctgatgagacaggctttttatttttcaaaacgcgcatacaaaaaaagcctccactgggaggctttcaggcgctgttttccgtttctcttctcacgcgctagcctcctggattcaggtgctaaagtaaaaaaagaagcggaaaatagcagcattcattgcttgcgttaccttttggtactcttcaaaagacctttattgaaaaggctacggcgataaaagtcaatgttttgatggcgttgaaacgaaaagagggagactagctccctctttcaactggcttatgccagagctgctttcgctttttcaaccagagcggtgaacgctactttgtcgaatactgcgatatcagccaggatcttacggtcgatttcaacagaggcttttttcaggccattgatgaatttgctgtaagaaataccgttctgacgtgctgctgcgttgatacgcgcaatccacagttgacggaactgacgcttacgttgacgacggtcacggtaagcatactgaccagctttgataacagcctggaaggcaacgcggtatacgcgagaacgcgcaccgtagtagcctttagcttgtttcaaaattttcttgtgacgtgcacgtgcaataacaccacgttttacgcgagccatatgtgctctcctgtatctatattctaattaaaaagttaaaaacgttaacggcttatgcgtacggcaggcacgcgattaccaggcccagatcgcctttggaaaccatggctttcggacgcaggtgacgtttacgtttggtcgcttttttggtcagaatgtgacgcaggttagcgtgcttgtgcttaaaaccacctttaccggtttttttgaagcgcttagcagcaccgcgtacggtcttaatttttggcattttaataacttccacttcgcattgttaataaacgaaacaaaggcgaacaaagcctgtgaagcccgaaggctccacagacagtgctacttgaaggccttactgtttcttcttaggagcgagcaccatgatcatctggcggccttcgatcttcgttgggaaggattcgaccactgccagttcttgcaaatcgtctttcacgcgattaagcacttccataccgatttgctggtgcgccatctcacgaccgcggaaacgcagcgtgattttggctttatcaccctcttcgagaaagcgaatcaggctgcggagttttacctgatagtcgccttcatctgtaccaggacggaatttaatttccttaacctggataactttttgctttttcttctgttccttagaagacttgctcttttcatagaggaatttgccgtaatccattatacgacaaaccggcggctcggcgttagggctgatctcgactaagtctactccggcttcttctgctttctccagagcttctctcagactcacaataccaagctgctcgccttccagacctgttaagcgaacttcctgggcgcgaatttcgccattgatacggttagggcgcgccgtttgaactcgttttccgcctttaataccttattcctccaattgtttaagactgcggctgcgaatctcttgttgcagcttctcgatcacttcatttacgtccatgcttcccaggtctttaccacggcgggtgcgaacggtaactttgccactttccacctctttatcaccacagaccagcatatatgggacgcgacgcaaagtgtgctcgcggattttaaagccaatcttctcatttctcaagtctgctttaacacgaatgcccgcattacttagtttttgcgtcaattcgttaacgtattcagactgactatcggtaatattcatgataacaacctgaaccggcgcaagccaggtcgggaagaaaccagcgaactcttcggtcaggataccgatgaaacgttccatgctccccagaattgcgcggtgaatcattaccggtactttacgttcattgtcttcgcctacataagaagcgctcagacgagacggcaaagagaagtccagctgtactgtaccgcactgccatgcacgatcgaggcagtcatacagggtaaattcaattttcggaccgtagaaagcgccttcacccagttgatattcaaacgggatgttgttttcttccagcgcaaccgccaggtccgcctcagcacgatcccacatttcgtcgctgccaatacgtttttcaggacgagtggagagtttgacgacgatcttctcgaagccaaaagtgctgtacatatcatagactaaacggatacatccgttaacttcatcgcgaatttgttcttcagtacagaagatatgcgcgtcatcctgggtaaatccacgcacgcgcatcaggccatgcaggctaccactcggctcgttacggtggcagctaccaaactcggccatacgcagcggcagatcgcgataagacttcagcccctggttgaaaatttgtacgtgacccgggcagttcatcggcttaatgcagtattcacggttctcagaagatgtggtgaacattgcatctttgtagttgtcccagtgaccggttttttcccacaggacacggtccatcatgaacggacctttaacttcctgatactggtactctttcagtttagaacgaacaaacacttccagttcacggaagatggtccagccgtcgttgtgccagaataccatacccggcgcttcttcctgcatatggtacaggtcgagctgtttaccgattttacggtggtcgcgtttcgcggcttcttccaggcgctgcaggtaagcgttaagtgcttttttgtctgcccacgccgtaccgtaaatacgttgcaacattttgttgttgctgtcgccacgccagtaagcccctgccgttttcattagtttgaaatgatggcagaaacgcatgttcggtacgtgcggaccgcggcacatatcgacatattcttcatggaagtacagacctggcttgtcatcatgggcgatgttttcgtcaagaatggagactttgtagctctccccacggttggcgaaagtttcacgcgcttcgtgccagctgactttcttcttaatgacgtcgtagtttttctcagcaagctcatgcatccgcttctcgagtgcttcgacatcttcctgggttaacgtgcggtcaagatcaacgtcgtaataaaaaccgttgtcaataaccgggccgattgccattttggtatgcggccaaagttgtttaatcgcgtgccctaacaggtgcgcacaggagtgacgaatgatctccagaccttcttcgtctttggcggtaatgatgctcagttgtgcgtcgttttcaatcagatcgcaagcatcaaccagttcgccattaacgcgccctgcgatacaggctttcgccagacctggaccaatgtccagcgcaacatccatggggcttacagcgtgatcgtaatggcgttggctgccatcaggaagagttataacaggcattttatatccttatttgcagtggtgacccacacgaaagatcacatacaaagaaaaatttgtttattaacagttcattgcgaaaccatctagccaacaaatgctaaattggttcgcaatcaggtacacaaatgaaagacattaacctctcaccttccacccggttgagcgatgttaacactaaaaaaagggagattgtacctttccgtttcacattgattcgattcgcaattcgtttgtagtgagtacaccagcaaaacgcttaaagaacaactgataacatcacggtgcgtctgaaaggtttactgcgagcggatttacagcagcataaactgaatccagcaaagttcgttgcgtgatttggcggtagtattttaaacgctcatgagattaatgacgaagtggtcatatcacaatgataaaagtgacacaattcttataacaatttttcgtgcacatttcgttctggcgataataattaatcatcatcctcaaaacctccagatatatataaggcgaacagattatgagtcaaaacgatatcattatcagaactcattataagtctcctcatagattgcacatcgatagcgacataccaacaccttcatcagagcctattaatcaatttgcgcgccagctcatcaccctacttgatacctctgacttaagttcgatgctgtcatactgtgttactcaggaatttaccgcaaactgtcgaaaaatatcacaaaattgttattccactgccctttttaccattaactttgccacttcacccatccatacagaaaatatactcattacattacactataaaaaagaaatcatttccttattactggaaaccacgcctattaaagctaaccatttgcgaagcatactggattatattgaacaggaacagttaactgctgaagatcgtaaccattgtatgaaactgtctaaaaaaatccatagagaaaaaaactatacacccaacagtaaatctcaatggtagtgcatgttttttgcaatctccttctgacgctattttttgtcgccatctgtcattgcaatacgcccttgattcattgagaaatggaaaaggcaaagtcaacctgattaaacattactcctccgttgaatccatacagcagcatgtccccttagtccgggacgcggagttcagagcattacttcgccatcctcctgcagggagtcgcgttatcgcgagtaaggattttggcttcgctttagatattttcttttgtcgaatgatggcaaacaatgtcagtcatatgtccgcgattttatatatagacaatcatactttgtcagtaaggctacgaataaagcagtcagtgtatggacaattaaattatgttgtgtccgtttacgacccgaacgataccaacgttgccgtcagagacacccacaggacagcacggggctttctttcgcttgataagttcatcagttcaggtcccgatgctcagacctgggctgatagatatgttcgcaactgtgcaattgctattctgcccctattacctgtgggagttccaggggctattttcgcgggtattgcatcacgaatgccatttgcccctatacatccatcggcaatgttgttaataatggctacaggccagtctcaacagcttattacattattcaaacagttgcccatactccctgaaaaagaaatcattgaaataataactgcgcagaatagcgttggtacacctgctttatttttggctatgatgaacggacatactgacaacgtgaaaatatttatgcaagaaattcagtcactggtagataatcacatcattcatgaagataatctggttaaattactgcaaactaaaagtgctaacgaaacacctggactttatatctccatgttgtatggattcgatgaaataatcgatatctttctgaatgcattaaccactccaatagcacaagagcttttaaacaaaaaactggtgatgagtattttagccatgaaaatacatgatggtgagccaggattatacgccgcaatggaaaataatcaccctttgtgtgtcacacggttcctctctaaaattaatggcatcgcctttaaatacaagttgagcaaagctaacatcatggatttattaaaaggagctacagcacagggaacccctgcattatacatcgccatgagcaagggtaatgaagacgtcgtgttatcttatatatcgacgctgggtgcttttgcaaaaaaacattcttttagtcaacatcagttatttacactattggccgctaaaaatcatgacaacatgtcagctgttcatatagccattcatcataagcattataaaactgtagaaacatattatgctgctattaatgcaatcagccaaagcctgagttttagtgctgatgaaataaagacgtatttataaccagctatttacgatatatatcgatacataattttatttttttcataaaacgcagaaacagtgaccatgtgcacaacgccacccgacggctgtaataacaaaaaatcccttgatgcctgtcccttttgttacactccgttatcacgcacaagagatatgcaggacactggtatgccgactaaacgctttgataaaaaacactggaagatggtggtggtgctactggcaatctgtggcgctatgttgttgctacgttgggcagcaatgatttggggctgagcagtgacaaacgaagacagccagaccgcataacacggtccggcagataattttacatgctgtagcccaggcttaaggttgtccgacggtcggtatgttccggtgcagactctggaggttcagagttccatgtgacgttgtaagccaccttcagtccaaaatgttcattaatagcaacatttaatgcgctttcggagttcagcgttgtgtcttccgcgccaaagacgctaacaccctgcgtaaatttagcgttgtcagtcaactgccatgcataagccccggaggcatagcccagcggctgggtttcactggcattgtcggtatatttgtcgtaacgcacacctggaccgaattcaaagcggaaactgtgtaccgggccattcaaaaactgacgaccataacccgcggtcaacacatcgcgctctcgatagccgttataacggtctgtcagccagcttgcctgaccaaataaatagtcataatcagttaaattaaaacggctacgcccgcccgccgcatatttttcactagaacgctcatcattagaagaagtattactggcgttcccccacaggctccaggcagtggtgtgtccataccaggtcatggtggtgtcagccgtaagactggagcttttcgtattgccactttgtgcaagatatcctgcgttcagattaccttcgaaaggttttttagcgctggcaggatcatccatgacagtaaaaacggaatcatcggcagctgcattcagactcgcaaacatgccccccgccaacataacgatggcaggaactgtcttcaaaagcttcatttatcaagagtccgtacaacaaaaaaagagaccatcgcggtcccggaaactttcttaaggatcaaagattagcgtccctggaaaggtaacgaattataaaaaggcgcgaataacttagcaatgtattcttatttcattttttgaataagcatgtggcgaaaacagatttttatttatatatatttatctgcaaaattttaaataaagctccaataaatcatattgttaatttcttcactttccgctgattcggtgccagactgaaatcagcctataggaggaaatgatggtacgtatctatacgttgacacttgcgccctctctcgatagcgcaacaattaccccgcaaatttatcccgaaggaaaactgcgctgtaccgcaccggtgttcgaacccgggggcggcggcatcaacgtcgcccgcgccattgcccatcttggaggcagtgccacagcgatcttcccggcgggtggcgcgaccggcgaacacctggttagtctgttggcggatgaaaatgtccccgtcgctactgtagaagccaaagactggacccggcagaatttacacgtacatgtggaagcaagcggtgagcagtatcgttttgttatgccaggcgcggcattaaatgaagatgagtttcgccagcttgaagagcaagttctggaaattgaatccggggccatcctggtcataagcggaagcctgccgccaggtgtgaagctggaaaaattaacccaactgatttccgctgcgcaaaaacaagggatccgctgcatcgtcgacagttctggcgaagcgttaagtgcagcactggcaattggtaacatcgagttggttaagcctaaccaaaaagaactcagtgcgctggtgaatcgcgaactcacccagccggacgatgtccgcaaagccgcgcaggaaatcgttaatagcggcaaggccaaacgggttgtcgtttccctgggtccacaaggagcgctgggtgttgatagtgaaaactgtattcaggtggtgccaccaccggtgaaaagccagagtaccgttggcgctggtgacagcatggtcggcgcgatgacactgaaactggcagaaaatgcctctcttgaagagatggttcgttttggcgtagctgcggggagtgcagccacactcaatcagggaacacgtctgtgctcccatgacgatacgcaaaaaatttacgcttacctttcccgctaacaaaaacattcccccagcattgggggaatcatcaccaacctgtcggcaacgcgtttctccgactatgctcaaaagtcatgtgataacaaaggggtgaactatggccagtggcgatcttgtccgttatgtcataaccgtcatgttgcatgaggatacattgactgaaattaacgagttgaataattacctgactcgcgacggttttttgctcactatgacggatgatgagggaaatatccatgagctgggaactaacacttttggacttatcagtacccaaagtgaagaagaaattagagaactggttagcgggcttacccaaagtgcaaccggcaaagatcctgaaatcaccatcacgacctgggaggaatggaatagcaacagaaaataaatggtttttgggcaataatcagtctgtggtgtgcgttagctcgtgtttttacaccgcattcttgcgctaaccttatgatctggcagacaacatgggagagacatcatgtggcaggcaatcagtcgtcttttgagcgagcagttaggtgaaggcgaaatcgaactgcgtaatgaactgcctggcggagaagtccatgccgcatggcatttgcgctatgcaggacatgattttttcgtcaaatgtgatgaaagggaactgcttcccggttttaccgccgaagccgaccaactggagttactgagccgtagtaaaaccgtcaccgtgcctaaggtttgggcagttggcgctgaccgtgactacagttttctggtgatggattatctcccacctcgtccgctggatgcgcatagcgcatttattcttggtcagcaaattgcgcgtttacatcaatggagcgaccaaccacaatttggccttgatttcgataacgcgctctccacaactccacagcccaacacctggcaacgtcgctggagtacgttttttgctgaacaacggattggctggcagttggaactggctgcagaaaaagggatcgctttcggcaatatcgacgccatcgtcgagcatattcagcagcgtctggccagtcatcaaccgcagccttctctgttgcacggcgatttatggtccggcaactgtgcactgggtccggatggcccgtacattttcgacccggcctgctactggggtgaccgagagtgcgacctggcgatgttaccgctgcatactgaacagccgccacaaatctatgacggctatcagagtgtatccccgctacctgccgatttccttgaacgtcaaccggtttaccaactctacacgctgttaaatcgtgcaaggttatttggcggtcagcatttggttattgctcagcagagtttggatagattattagcagcatgatatgggttgaggataatggccgctccgtgcggccttttgattaaataaacccaagcagagaaaagaacacataacctgcagcaatacaaataaccggcaggatatacagactgaaaaactgcaggaaaatagtatggtgcggaacaacaatacgggactcaatttgttcacgcgttagcccctcttcccctttggctttttccagaatgagttgatcttcaacaccttcccgcaagaagcgcgcctggcgactcatccgggcaccggaatcctgcaacgccagtccgacaaaaatcaggatgaaaatcacccagaacataacgttcacgccaccattaaaattgggcgtcggggagttataccagaatagattcaaaaaaggcgtattcgcctgcatcatatcgatcatgacatgagtaaagtcgagcatgaccgcattaatgccttccttgttttcctgccgggtattcataaatttcagcaaagaaatcaatgtagagatcaatgcaggtataaaaatcacccaacccaaaatccttttcaaaacagcaatgcgtccagcttgttgatacgtcatgagttctccttgattaagacgcgtcgtttcacttagtttacctgtagatatctgttttcgcccattctttaaaggcgatatgataggcgcttaatcataagcacggcttaataccttacacataatgctctaaaggagaggttgtaatgagtaccccgcgtcagattcttgctgcaatttttgatatggatggattacttatcgacagtgaacctttatgggatcgagccgaactggatgtgatggcaagcctgggggtggatatctcccgtcgtaacgagctgccggacaccttaggtttacgcatcgatatggtggtcgatctttggtacgcccggcaaccgtggaatgggccaagccgtcaggaagtagtagaacgggttattgcccgtgccattagtctggttgaagagacacgtccattattaccaggcgtgcgcgaagccgttgcgttatgcaaagaacaaggtttattggtgggactggcctccgcgagtccactacatatgctggaaaaagtgttgaccatgtttgacttacgcgacagtttcgatgccctcgccagcgccgaaaaactgccttacagcaagccgcatccgcaagtatatctcgactgcgcagcaaaactgggcgttgaccctctgacctgcgtagcgctggaagatagcgtaaatggcatgatcgcctctaaagcagcccgcatgcgttccatcgtcgttcctgcgccagaagcgcaaaatgatccacgttttgtattagcagacgtcaaacttagtagcctgacagaactcaccgcaaaagaccttctcggttaatgaccaggggcagtgatctcgctgcccctggttctttatctgaaattgcattcaactgacggattaatcgtcaatttaagagaaagagttacaccgtcaccacttccgtgcactgtataaaaatcctatactgtacgtatcgacagtttagtgagttttatcatgacggcggaaggtcaccttctcttttctattgcttgtgcggtatttgccaaaaatgccgagctgacgcccgtgctggcacagggtgactggtggcatattgtcccttccgcaatcctgacgtgtttgttaccggacatcgatcacccaaagagctttcttgggcagcgattaaaatggataagtaaaccgatcgcccgcgcttttgggcatcgtggttttacccacagtctgctggcggtatttgcgctgctggcaaccttttaccttaaggttccggaaggctggttcattccggctgatgcgctacaaggaatggtgctgggttatttgagccacatacttgccgatatgctgacacccgccggtgttcccctgctctggccatgccgctggcgtttccgcttgcctatcctggttccccaaaagggcaaccaactggaacgttttatctgcatggcattatttgtctggagcgtatggatgccccatagtttacccgagaacagcgctgttcgttggagtagccaaatgatcaataccttgcagatccagtttcatcggcttattaagcatcaggttgaatactaaaaaggcaaaaatcacctttctggaataagcaattccatttgaatataagagccagctcacagttctgttaatcttgcgccaacactatgactgctacgcagtgatagaaataataagatcaggagaacggggatgaactttccattaattgcgaacatcgtggtgttcgttgtactgctgtttgcgctggctcagacccgccataaacagtggagtctggcgaaaaaagtgctggtgggtctggtgatgggtgtggtttttggccttgccctgcataccatttatggttctgacagccaggtacttaaagattctgtacagtggtttaacatcgttggtaacggctatgttcaactgctgcaaatgatcgttatgccgttagtcttcgcctctattctgagcgcggttgcccgtctgcataacgcatctcagttaggcaaaatcagttttctgaccatcggtacgcttttgtttaccacgctgattgcggcgctggtcggtgtgctggtcaccaacctgtttggtttgacggctgaaggtctggttcagggtggtgcagaaactgcacgtctgaacgccattgaaagtaactatgttggtaaagtctctgatctgagcgttccgcagctggtcttgtcctttatcccgaaaaacccgtttgccgatcttaccggagccaatccgacgagtattatcagcgtggtaatttttgccgcattcctcggcgtagctgcattgaaactgctgaaggatgatgcgccgaaaggtgaacgcgtcttagccgctatcgataccctacaaagctgggtgatgaaactggttcgcctggtcatgcagttgaccccttacggcgttctggctctaatgaccaaagtggttgcaggttctaacttgcaagacatcatcaaactgggaagtttcgttgtcgcgtcctacctcggtctgctgattatgtttgcagtgcatggcattctgctgggcattaatggcgtgagtccgctgaagtacttccgtaaggtatggcctgtgctgacgtttgcctttaccagccgttccagtgctgcgtctatcccactgaatgtggaagcacaaacgcgtcgtctgggcgttcctgaatccatcgccagtttcgccgcctctttcggtgcaaccattggtcagaacggctgcgccggtttgtatccggcaatgctggcggtgatggttgcgcctacggttggcattaacccgctggacccgatgtggattgcgacgctggtcggtattgttaccgttagttccgcaggcgttgccggtgtcggtggtggtgcaactttcgccgcactgattgtactgcctgcgatgggcctgccagtaaccctggtggcgctgttaatctccgttgaaccgcttatcgacatgggccgtacggcgttaaacgttagtggcagcatgacagctggcacgctgaccagccagtggctgaagcaaaccgataaagccattctggatagcgaagacgacgccgaactggcacaccattaattcttatgctggcaacggtccgttttgtataggggccgttgccttactttttaaatgttccatcgcggcgatgcatacactctcatatttaaacagatcgtcagcgaaaaaaatgtccaacttatcaatacattcctggctcaaactatgtgcctgtaggctgaagcttaaaacctcatacccgagacgttttctaagactactatctggaatactcataatatcttcaagcacaccacttcccattcccggaagatttagtggattaaaaagaagattgatattaagcatacttattatgctaggaaactttaggagactctcatttttttgaatcgcagcaaaaatgctcccgacaggatgtatataattttgttcatagtatatagtccttaaatagtgaataaccaacctgttttttatactgatcaaattggtcattttttctgggcgaaatacagaagtgacatccattccaataaaatctttatttatacctcttatccgaatttcactaccataaagattattaattattactctatatttaacattgtcctgcagatatgtatcaaaactaagtgctggcgctcctggcttactggcatcatagttaatgttagacatataggcaatcatataattaaagttactttctgctatttcatcgcagtcacattgacccgtacttataaagaaagtgagtgctgtcatagtagactgcagcctttctttaaaagagtcgaaagccaggcttttaatatttaaatcaccataattactctgtattaagtttgtagaaaacatctcccgcctcatattgttaacaaaattattatctcatttaaatctaagtcatttacaatataagtttaagagcgacgccacaggatgaactatcaaaaatagctcatcatgattagcaaaacttaaccattttaaaataaataaacaattaaagaaaaaagatcacttatttatagcaatagatcgtcaaaggcagctttttgttacaggtggtttgaatgaatgtagcaacgaaatacagaatttcaggtcatgtaactcccggcaaaaccgggaggtatgtaatccttactcagtcacttccccttcctggcggatctgatttgcccaacgttgggcagattcaggcacagtaaacgccggactgcgcagaaaactctctcccatcagtacaaacgcaacatatttgccacgcagcatccagacatcacgaaagctatccatctttatcgcatgttctggcggcgcgggttccgtgcgtgggacatagctaataatctggcggttttgctggcggagcggtttcttcattactggcttcactaaacgcatattaaaaatcagaaaaactgtagtttagccgatttagcccctgtacgtcccgctttgcgtgtatttcataacaccgtttccagaatagtctccgaagcgggatctggctggtggtctatagttagagagttttttgaccaaaacagcggccctttcagtaataaattaaggagacgagttcaatgagccaacataacgaaaagaacccacatcagcaccagagtccactacacgattccagcgaagcgaaaccggggatggacagtctggcacctgaggacggctctcatcgtccagcggctgaaccaacaccgccaggtgcacaacctaccgccccagggagcctgaaagcccctgatacgcgtaacgaaaaacttaattctctggaagacgtacgcaaaggcagtgaaaattatgcgctgaccactaatcagggcgtgcgcatcgccgacgatcaaaacagtctgcgtgccggtagccgtggtccaacgctgctggaagattttattctgcgcgagaaaatcacccactttgaccatgagcgcattccggaacgtattgttcatgcacgcggaagtgccgctcacggttatttccagccatataaaagcttaagcgatattaccaaagcggatttcctcagtgatccgaacaaaatcaccccagtatttgtacgtttctctaccgttcagggtggtgctggctctgctgataccgtgcgtgatatccgtggctttgccaccaagttctataccgaagagggtatttttgacctcgttggcaataacacgccaatcttctttatccaggatgcgcataaattccccgattttgttcatgcggtaaaaccagaaccgcactgggcaattccacaagggcaaagtgcccacgatactttctgggattatgtttctctgcaacctgaaactctgcacaacgtgatgtgggcgatgagcgatcgcggcatcccccgcagttaccgcaccatggaaggcttcggtattcacaccttccgcctgattaatgccgaagggaaggcaacgtttgtacgtttccactggaaaccactggcaggtaaagccagtctcgtttgggatgaagcacaaaaactcaccggacgtgacccggacttccaccgccgcgagttgtgggaagccattgaagcaggcgattttccggaatacgaactgggcttccagttgattcctgaagaagatgaattcaagttcgacttcgatcttctcgatccaaccaaacttatcccggaagaactggtgcccgttcagcgtgtcggcaaaatggtgctcaatcgcaacccggataacttctttgctgaaaacgaacaggcggctttccatcctgggcatatcgtgccgggactggacttcaccaacgatccgctgttgcagggacgtttgttctcctataccgatacacaaatcagtcgtcttggtgggccgaatttccatgagattccgattaaccgtccgacctgcccttaccataatttccagcgtgacggcatgcatcgcatggggatcgacactaacccggcgaattacgaaccgaacagcattaacgataactggccgcgcgaaacaccgccggggccgaaacgcggcggttttgaaagttaccaggagcgcgtggaaggcaataaagttcgcgagcgcagcccaagctttggcgaatattattcccatccgcgtctgttctggctaagtcagacgccatttgagcagcgccatattgtcgatggtttcagttttgagttaagcaaagtcgttcgtccgtatattcgtgagcgcgttgttgaccagctggcgcatattgatctcactctggcccaggcggtggcgaaaaatctcggtatcgaactgactgacgaccagctgaatatcaccccacctccggacgtcaacggtctgaaaaaggatccatccttaagtttgtacgccattcctgacggtgatgtgaaaggtcgcgtggtagcgattttacttaatgatgaagtgagaagcgcagaccttctggccattctcaaggcgctgaaggccaaaggcgttcatgccaaactgctctactcccgaatgggtgaagtgactgcggatgacggtacggtgttgcctatagccgctacctttgccggtgcacctagcctgacggtcgatgcggtcattgtcccttgcggcaatatcgcggatatcgctgacaacggcgatgccaactactacctgatggaagcctacaaacaccttaaaccgattgcgctggcgggtgacgcgcgcaagtttaaagcaacaatcaagatcgctgaccagggtgaagaagggattgtggaagctgacagcgctgacggtagttttatggatgaactgctaacgctgatggcagcacaccgcgtgtggagtcgcattcctaagattgacaaaattcctgcctgatgggaggcggcgcaattgcgccgcctcaaatgatttacatagtgcgctttgtttatgccggatgcggcgtgaacgccttatccggcctacaaaactgtgcaaattcaatatattgcaggaaacacgtaggcctgataagcgaagcgcatcaggcagttttgcgtttgtcagcagtctcaagcggcgcagttacgccgcctttgtaggaattaatcgccggatgcaaggttcacgccgcatctggcaaacatcctcacttacacatcccgataactccccaaccgataaccacgctgagcgatagcacctttcaagctcgcacttgtcaacacatccagctccgttaagcgtgggaaacagtaagcactctgacggatagtattatcgataaacgccggatgacacatcacctccaggctacgatcaccccgatggcctgcgtcatccagcacttgcaggaacaggctctcactgatctcttcaccgtagaatgcactgctgaatccctgggtagtgcgcaggttgaccggcaaatcaaacgccatctgacgatccgcccgcaacgcaatgccctgctctgccgcaaacctggcaacaatcgggaaaatctgcgggaacatatgcacatgatgatggctatcaagatgcgtaggtttgcgtccaaatagctcaatgaaacgcaaatactgactgacaagctcctgagtaatttcttccagcggtaaagcatcttcttctgccaactgccagatccattttcccagcacaccatcgcgggttaaccccggcatagctgtcagtggcttacccatagtaaggacaaagtgcatccctatggccagactcggttcatcacgactcaactgcaccgcatggtcaatagcctgcccattcaccagcgccgtcgtgctcgtgacaatcccattgcgacaggcctcgataatgccgtagttctgacctttgcttaagccaaaatcatcggcattaacaatcagtaagcgttccataatcagcctcggttaatgtgcttttttaagctctgcgatgcagtcggcaaagtttggcagccatttctcgtgcgccagaatcatctcgcgtgccagcagctcagcatcgcgatcggaatgcaccaacggactaaggtttagcgccagtaacacatcgttaaattctccgctaagtgcggcgttactggcagcaatctcgaagcctttaatggtgtgaatcagccccattactttatcatcgaaatgcgtaatgcgcggatgtggcgtcgcgccatcgcgccccagcttacaggtcatttctactgcccagtctgccggaatattatcaatctgcccatgatgcgggatattaacgtaatgttctgcttgcttgtcgttgtagatagcgttgatcacttcgcatgctgcatcagagtaataagccccaccgcgctgttccagttctttcggcttaactttcagctcaggatttttatacagctcaaaaagttgtttctcgactttctgtactacctgcgctcgtgcgccgcctttgtagtattcgcccatttcaatagccagcatctctttctgcttgaagtaatacagcagataagaacatggcagcagattcaagctacgaattaagccctcactaaatggcagatcgaaaatattttttacagaggacgcttttaactgcccactcgccacaccatcaagcaattcggcaaagcggctcttgccatttatcagcacatccttaatgaacaccatatggttgaggccgaacaaatcgatagataaatcatcgctgtctttcagcatcagaacatcgcgaataaacatcttcatgccgatcggaatattacacacgccgataaagcgtttaaatccggtatgacgataaacggcttcagtgaccattcccgccgggttagtgaagttaatcacccatgcattcggacaaagttcttcgacatcttttacgatgtcaaaaatcaccggaatggtacgcagacctttaaacaaaccgcccgcgccgttggtttcctgaccaagataaccatgacttaatggaatacgttcatccagttcacgcgccggtaattggccaacgcgcagttgggtagtaacgaaatcagcatctttcaatgcttcgcggcgatccagcgttttataaagcttcatcgggacgccagcgttatcaatcatccgttggcagagatcgaaaataatatccagtttcggtttaccaccttcgacatccaccagccataattcgctgaccggcaattcgtgataacgcttaataaatccttccagtaactccggggtatagctgctcccgccaccaatagtgacgacttttaatttctggctcataatttctcccttcagtacagaatactgatatctggcatatctgcccccccggacataaataatccagcaacaggacagatatgtgaattgtcaggtataacgacttgctgattaaattcagtcaatttcttacgatagctcttaggcgtaaaggacgttaatttcttaaacgttttaataaacaaactcgggctactataaccggcctcaaacgcaatatccgtcacactatagttggtcatttccagttgttttttggcaaaattaatacggatttcattaataatctgcattggcgttttgccataatatcgttgagtcgctcgcgtcaaatattcctgacttttggcactcaacgccaccatattctccagcgcgctttcactaaactgctctttatcatgcatcttttctaccgtacttttcagccactgcggtacatcatcaatcacctgttcttcgcggtaatgacgtaaacggttaatgacataaaaagtaaccatctcaacaaactcttccagccctgtttcgcggaaattcaaactagaaatcactgtttccacataggtgagaaaagcgttattggtccggtatacctggctagcgacaaagcaataaggcaacaatggcaggtaatgctgctcaaaaaagcgtttactgatcccaacgttcaatatgcgcgtggcaccaaactcataaaaactttgatggtggctacctaacgaaataaaaacaaaatcgccccgttccagtaacacgcgcttaccgttaatctcctggaaataacgcccggttaataccagagtaaattcataatagtcgtgctgatgcagtccgctgatactctcagttttgttatagataaacacatggaagtttttgccattaaacaactgctgttctcgggcagtggcaatttccggcgcgttaatcactggctgcatcatcgactccttatgccttcagtttttcatgaagctcaattaattcagtaatcagttcacgcgcaagcatggacgtcattaaatgatcctgagcgtggaccagcaccagactcactttcatcttaccttcgcccgcatcgccttcaatcagtttcgtctgtaccagatgcgcttcattcaatgccatccgactctgatccatcatggcttttgctgcggcaaaatcgccctgcttcgcctgtttcagtgccgcatacgccaggctgcgcgcttgtccggagttgatgatcagccccatcaccacttcttccagctcttcagcttccgtttgcgtatcgggaatgttatcgagatccatcatacatcgttcctctcttttcttaccggcacgattacccgtaccggcatcgattaaaatttcagggcgttagcgatatcttcttcgctctcttctttatcaatcgcattttgtgctttgttagccaccacaacaaagggcagataaattaacgttgcgatgccaaggttgaagagtgcgaccagcaatgcggcgacgctaccgttggtgttaaagaaggctcccagaccggttggcatggtccacggtgcaatattggtcaccggaggaataatgcccatgtagtacgctgcgagggtgattgccgccagaatcggttgtaccagtacaaacgggataaacatcaccgggttcatgataattggcagaccaaacagaatcggttcgttaatctggaagatgccggacggcagcgccagttttgccacctgacgataatcagcacggcgagaggcgataaagatagccaggatcaggcctaaagtcgcaccactgcccccaaggaaaataaaggagtccagcatcggcttggcccagatatggaaggtcttaccggctgccagcgccgcttcgacggaaccatattgctgataggtcgcgatattttccagtgcccacggcgtcataatgccgttgtccagtgcggtcagcgccagcgcgccatgaataccgaagaaccagagcagtggaacaaagatcacataggcccagcccaccacgctacccaagcttgccagtggggtactgatggtatccataatgatctgatggaagttggtgccccaggtattcaacgcccaggcaataatccccatcacggaaagaataataaagccgggaattaatgcgctgaaggaacggcttacactagcaggtacgctgtcgggcagtttaatgacccaattgcggcggacaataaaggtaaacatttctgccaccaccaggccaataataatcccggagatgatattcgccccacctaaccagtttgcaccaaccgcataggcctcaccgacactatatggggtgacggtcataaatgctgcaacggataacaacccagccgccagcgcatcgactttacgctcttctgccagcgccatgccaataaagaacggtgccattaaagacattattcctaatgttccgttatatacgttgccgccaatacctttcagaccattaagtgtttcaatggtactggcgtcgaggcgaatacctaaggaataaaaaaagctcccctccccaaagcttagaaaaacgttgttaattaatacaaacatggcccccgcaagggttaacggcattaagcgaataaagccatttttgattgcattaacgtgtggctgctttcctattttaactgcaaaagggaggagtaccttttcaaggcttgcaataacattactcatagaaaaatacccttaaaaaccgcaatttaaatattgcggtattgatttatgaaataactctttgacgggaaaatttaaaataaattaatttgctgcggcttttttaatcgctgcaaccgcagccttaagcacgcctaaaccatcgactttgccataaagcaggctgtcaattacttcaaccggtttgttgggtaacaaacgctggatttcgggcaacatataagcaatctgcggccctaataacacgacatcggcattctgacctttttcaccagccagtgtttccggaaatgcttcaataatgaccggaacttcatatttttctgcctgtgcgcgcattttacttaccagtaaagaggtagacatgcccgcagaacaaaacagataaatgtgtttcttttccataaaactgccctcatcgacgattatctgtcagccagacactccgcaagccttaacctgcttccatgctctgggtaacttgcgaaaccaacatgactttttttgtggctgaaaggagtatacggtatagacctgagcaatagtatttctttgaccttataaattgtttctccttgacctgtggttatgaccctcttcacatttcgggcaaataattcgcgaagataattaagaactcaggccaaaaaaaaccggcgcaatggccggtttccgttgttactcaagctttcagacgaattgattacttcgcagcctgtggatcagtgtcgtattcagcacaggtctgataaccggagttgatgacatatccggtatcatctaacgcgacaaagtaggtttctgctttaccatcacgttgacccaggatgtaggtctggcaagtaccgcgagcatggatcatgctcacttcagagctaggtttacccgcaatttgtgcaacctgcgcccggctcatgccttttttgacgtctttcaccacaggctgtacaaactggtctttggtacgatcataagccgtacaacccgccagcatggttaataccgccgctgcactcagaattcctgccatattcttgttcatattccgtcctcttgtttatcagcgtgttagataagcctggaatacattgggcgctttttcaagcccgtgaacgaaacggctccgctttcagaggattcctgtatgacgttttaaccaccattcagcccgctgtcgcttgtcgtttcagtagcaacgggttagctttaaggaagttttgtcttttctgtctggaggggttcaatgacattgcaacaacaaataataaaggcgctgggcgcaaaaccgcagattaatgctgaagaggaaattcgtcgtagtgtcgattttctgaaaagctacctgcaaacttatccgttcattaaaagtctggtgctcgggatcagcggcggtcaggactccacgcttgccggaaagctgtgccagatggcgattaatgagctgcgcctggaaaccggcaacgaaagtctgcaatttattgccgtacgcctgccctatggtgttcaggccgacgaacaagattgccaggatgccattgcctttattcaaccggatcgcgtattaaccgttaatatcaagggcgcggtattggccagcgaacaggcattgcgggaagcaggcattgaactgagcgattttgtccgtggcaatgaaaaagcgcgtgagcggatgaaagcacaatatagcattgcgggtatgaccagcggtgtcgtggtgggcaccgatcatgcagcagaagccattaccggattcttcactaaatatggtgacggcggtacggacattaatccgctgtatcgtctcaacaaacgtcagggtaaacagttactggcggcattagcttgcccggaacacctttataagaaagcgccaacggccgatctggaagatgatcgcccttctctgccagatgaagtggcactcggcgtgacctatgacaatatcgacgactatctggaagggaaaaacgtacctcaacaggtcgccagaacaatagagaactggtatctgaaaaccgaacataaacgccgtccgccaattaccgttttcgatgatttctggaaaaagtaataatttgcacatattggattgtgcgaaaaagagtaatttgttcacgccggatgcggcgtgaacgccttattcgacctataaaactatgcaaattcaatacattgcaggagtcgaataggcctgacaggcgtagcacgtcagacggtgtaacctttgtcatcgacccgcctcttttttaatcgcttcccgcctgttacactggatagataaccagcattcggagtcaacagtggtacggcgtttaacttctccgcggctcgaatttgaagctgcggcaatttatgaatatcccgaacatttacgtagtttccttaatgacttacccacccgaccaggggtgtatctgtttcatggtgaaagtgacaccatgccgctctatatcggcaaaagcgttaacatccgcagccgcgtcctttctcatttacgtaccccggatgaagccgccatgctacggcaatcccgacggatcagctggatatgtaccgccggtgaaatcggcgctctgctccttgaagcgcgattaatcaaagaacaacagccgctgtttaataaacggttgcgccgcaatcgccagctctgtgccctgcaattaaatgaaaagcgcgtcgatgtggtgtatgccaaagaggtggattttagtcgagcccccaacctgtttggcctgtttgccaataggcgcgcagctttgcaagcattgcagaccatcgctgatgaacaaaaactttgttatggcctgctgggactggaaccgttaagtcgcggtcgtgcatgttttcgtagtgcgctaaaacgttgcgccggagcatgctgcggtaaagagagccatgaggaacatgcgctacgcttgcgccagtctctggagcgtttgcgggtggtgtgttggccttggcaaggggcggtggcgctgaaagaacagcacccggaaatgactcaatatcatattattcaaaactggctgtggctgggggcggttaatagcctggaagaagcgacaacgttaattcggacacccgccgggtttgatcacgacggttataaaattctttgtaagccgctgctttccggtaactatgaaattactgaacttgatccggcgaatgaccagcgagccagttgattactgaacttgatccgggctatgaccagcgagccagttgatttcactgaacaacagtttaccttgcggttgtaaaagccgcagggtgtgcctgccatcgaaccagcacgcgccctggtcggtagtgagcaatttatcgcccagttgccacgccccgttaatcacaaacaccaccccgccgcgactgccaaaggtagtaaacgtacgttcggcaattctgactttcgccttacagacatccaggcgtgtcatgatgttgaaatccatgctcatctgccctgccgtcagtttcgcttttaccacctggtccgctgcaaaggcaaaaggctggaacggttttaaggtatggttaaagcggtctgcgctttcaaggagcatctcgccgccttccagcaacgtcactatcctttccatgccgggaaacaaagaaaactccccattcgccgcgatggatgcaatgctggcacgccagtaaaaatcacgttttgccggtgggaacgtgcaaatttcgcgcgtttcaccggcagcatttcgccacagattcacgctcattttacgcatatcaaagtattccatactcgctcccggcccgttcttttcattgttatcgttcaggtaaccgtggatggttatcggcaactcgggtgatttacgttagtggtgatcaggctttttttacaactgtttgagaagagaaaagaaaaccgccgatcctgtccaccgcattactgcaaggtagtggacaagaccggcggtcttaagttttttggctgaaagattattcagcagttgcaggcattttaccttttgccgctggacgttctgtcagacgcttctcaaaattagcattaaattgctttttctgttccggcgtcaggatgttgtaaattttgttctgggtttccatgtgcgccagcatgttagctttgcgctgttcttccatttttgcgatctgcgcttcagcttttactttatcgaaggtatcgctggcaatgatgtcatgcattgcgcggcgttcttccagcggcggacgtttcatctggtcacgctggcctttcatgatttcgcggatctgctgtttctgcgcgtcggtcaggttcaggtctttgaacatcatgtcctgatgcggaccgaacttgcctttgtggtgcatcatcggcttcgcgtcagccggtgctgcggtagtggtgtctgcggcatgggccaggttagccgcgccaagagccagggtagaggcaacaaacagtgcagttaatttacgcatattctatatccttcctttcagttatttattacggctttcttaagtagcgtgccgtgttgacgagattaactttactgactttagcgtcaattaatcagagcaacggtaaaacaatgaaagtgtaaaaaacacttttgcgccaattatggagaaaaaaagaaaatttgatggagagtgatgagagaatattacaacacgatgattttgcagagattatgaagaactataccggatgactggtgataaataaagcaaataaccaggattaatctgtattaatttataagaaagcaacttaatacccgcagaatgatttctgcgggtaagtattagcttattttttcgagcattaatcccgcgcgtaatcccaacgctaccaacggattagggaataacacatactctacatcatgggttacggtaaaacgttcctctccgtcctgcgccagcaatgttcctttctcaaacggcataaaattcagcgtgtcacttgccatatgcatttcgaaggacgggctgtggcgagtaatttggctaaccacccgataacggagcggcggtgttctcacgataccgacactctcaccagatagcagcgcagcaattgcgctggcagttactgcaaactggcgaagatcgttttgcccaaagggcaacgctttgccaagttccagcgtacaggccagcgcgccaaaatgtctggcgctgaaatgggtaaacgtaccaccaggttcctgatggaacaccagcgcctccagccccgccgcacccagccacgtcagaaatttctcgtcccagggaatgtcgcgttgcggtaatacaccgaactgcggatgcaaggagccacgaattgcggtatgtagatcaaggtgccagcgcacagattctttgccctggtcataaaaatcttccaggcactgttccagttcgcgcgcccgacaggtttctccgctttcagcaaatagctgccaacgaccgccaaacattcgattcatatcgctatggcaataacgtttcccttgcttcagcgcaggaggattcccgaggatcaccagcaaccgccaacgtaacgggatctcgccgtgagatatcgcgccaagcaacgcgtccagcatctccacaggtgccgtctcattaccgtgtattcccgcactaatcaccagtgcgccttgcggtggcgttaatggcgtcagttccagcacaccatcgcccagccagcgccagcgaacgccgttgatttctcgctcggtgataaccggttttttacccgttaaggtcagagcaagaaaattatccattgccccctccctcgcgctggaacggataaacgctaccgagattcagtaattggctcaatacatccagtgcttcccgcccttcgcgcagcaattgcgggtcggccagatcggcagcagtaaggcgatcgcggtagtaacgatccacccagtcattgagcgcattaaacagcgtatcgttcatcatcaccgccggattcaccgcccggcgttcttcttctgtcaataccacccgcaaccgcaggcacgccgggccgccgccattcgccatgctttcacgtaaatcaaagacttttagttcgctaatcgggttgtcagcggcaaggagttcattgagataaccccatactccggcgtgttcccgacactcctgaggcagcaccaacatcatggaaccatcatcgcggctcagcagttggctgttaaacagataggtagacaccgtatcagacacggaaacctgagttgccggaacttctatcgccataaaaccattgacccgcgcacgcaggtttgccagtaactgactctggcgagcgaacgcctgttggtggcaaaacagcacctggcggttactcacggcaatcacgtcattatgaaaaacgccctggtcgataacgtccgggttttgctgggcgaaaatcacctgttggggattcacctgattcagccttgccaccgcctcgctggcttcgcgagtctgtcgcgccggataacgggaaggccgggtatcattgccttcttctcgcccgtagacaaaaagttgcatacccggttcaccgtaatgaccgccgagacgattgtggtttgccgccccctcatcaccgagcaacgctacctgtggcaacgcgctatggacgctaaatttctcttcgtcgttaaaaatcgcttttaacaggctttcagtgacgggcgcttccaggctacggtgaaatttattgttcaggttggcaacggtgagatgcactttgccatccagcgtatcggcagatggcgcgatcgttgccgcattggctacccacattgggctagcggaactgacgctggaaagccagtgcggtgcctggcgtgcaactttttccagtacctgctcatcgctaccactgaatcccaactgacgcagcaccggaataaacggacgctcgtgcggcgggatcacggcctgggggaatcccgcatcggcaagggctttcattttcagtaagccctgcttcgccgccagtcgcgggttagacacctgaaaacggtgacgggtagaggcttcattaccaaagctcaggcccgcgtaatgatgcgtcagccctaccagcccgtcgaaattgacttcccaggcgttcatcgcaccacctcatcggaaaaatccagcccggggttaagcgtggcgggcaatgttaagctgtcgctctccaggctcgccatcggccatgcgcagtaatctgcggcataccaggcgctggggcgatggttaccggaagcaccaatgccgccgaatggcgcggtactggcagcaccggtaagcggtttgttccagttaacaatccccgcccgcgcctccagcaacagttgatcgaacttttcccgctcgggggaaaccagaccgcaagagagtccgaagcgagtgttattcgccattcgaatcgcttcatcgaaagtatcataacgccagacgcgcaataacggtccgaacacctcttcatctggtacgccagcaacgcctgtcatttcaatgatccccggcgtcagcaagcttgtccctgcttgtaataagcgcggcgcaagcaggggtcgtccgcccatcgcttccagttgctgccatgcagtaaccacctgctgtgcggcctgttcagaaatcagcccgccaataaacggctgcggttcgtcatcccagttgcccggcgttaatcgctggctgacggcaaccagacgagcaagaaacgcatcgccctgcgccccgcttttcagcaataaacggcgggcgcaggtgcagcgttgaccggctgtgacaaacgcgctctgaatggtcagatggacagccgcgtcgatatccgccacctcatcgataattagcggattattaccgcccatctcaagggcgagaattttctccggctgaccggagagctggcgatgcaactggtagcctgtattggcgctaccggtaaacagcaaaccgtcgagatcctccagcgcactcagcgcctgacccgtttcacgcccgccctgcaccaggttcagcacgcctggcggcaagccagcctgctgccataaacgcattaccgcttcgccactccacggtgtcagttcgctgggtttaaagataatggtgttacctgccagcaatgccggaacgatatgtccgttcggcaaatgaccagggaaattatacggcccaaacaccgccagcacgccgtgcgggcgatgtcgcaggctcgccgcgccgtccggcatttcactacgctgctcgccggtacgaacgtgatacgccttaatacttatcgcgattttattgatcatcgccgtcacttcggttgccgcttcccagcgcggcttacccgtttctctggcaataatcgcggttaattcggctttattgctttccagcagtgcggcaaagcgttcgacaacggcatgacgttcagcaaaactaagccgcgcccagcgcggaaacgccgcacgggctgcccgacaagcctgctcgacctgagcggcatcggcatcattgccttgccataacacctcgccgcttaccggattacgcttcacacggcttgcgccctggcccgttatccagtcaccgttaatccataaagtcatgctgttttctcctctgcgcacaggcgcaccagacgaacgcgatccccggcgtggcatttgagggcatccagttgtgcggcggttaaaatcaaacgctcggttgccggatcggtacgcaccagcaccacgcggaaatggtgataattttcattggcgaccaggcaggctgggaaatcgccctgcgcaggctgcccttctgccacttccaccagccgacttttacggatggcgcgcacgcggtcgatgtcacactcaagcgtcggcccaccgtcaaagatgtcgatatagttacggtagcgaaaaccttctttctccagcaccgcgcgggcaggcgcggtttgcggatgtacctgaccgatgacgtcctgggcttcctgggataaaaagtgggtatagatcggatgtttcggcatcagttctgcaataaatgccttttgcccggtgccgcagagaaaatcggcgcggctaaaatccatgctaaagaagcgtttaccgaggctttgccagaacggactatagccgtgttcgtcaatcaccccgcgcatttcagcaaccactttgtcattaaacttgtcgcgaaaagccgccataaacataaagcggcttttgctcagcaaatagccgttgccctctttgcgccagtccgggtcgagaaacagcgtgcacagctcgctgctgccggtgtgatcgttactgagaaacagcgtcggcaatgcgttatagacattcagctctttactggcgtgaaccaacgtgccgacgcgatagttgtaccagggatcgttcagcccaaccgccacctcaatggcacaaatccccgccacggtgcctgtctcgctatcttccagcacgaacacatagccctgctcacttttgggcagttcgccttgccaggttttgattgccctttcgatacgcgcgctaagcgtggcttcattggcgggaaggctcgtcaggccgccgcccgttttgctggcaagctgcatcagcgcgctgacatcacttcgctcaacgggacggatgaccatcatgatgaacctcggctaacaaattatttcaactactacctcggctaacaaagtgttcgcaagcagctgcaaagcgatccagtccggtcgtcacctcttcttcgctgacattgagcgcaggcgcaaaacgcaccacgttgccacccgcaatcagtaccatcacgcctgctttcgccgcttcctgagagatctgtttcgcttgcccggcgtaatcggcattcagtacacagccaatcagcaaacctaagccgcgaacttcactgaacaaaccatagcggtgattaatagtattaagacgctcaacaaaccagtcgtgacgctgtttaacgccattaagcatctctggtgtgttgatgagctccagcactttgcctgccaccgcgctggccagcggattaccgccataggtggtgccatgagtgccaacggtcatcacgcgggcgcactcttcggttgccaacaacgcaccgaccgggaaaccgccgcccagcgctttggcggtagttaacagatcaggcgtcacgccgtagtgcatataggcatacagttccccggtgcgcccgacgccggtttgtacttcatcaaaaatcaacagcgcattgtggcggttacacaattcacgcagaccttgtaaaaacgcgttgctggctggcaccacaccgccttccccctggatgggttcgacaatcaccgcacaggtagagtcgtcaatcagcgcgctggcagagttaatatcgttatatgcagcatgacgaatatccgccggcagtggcgcaaaatcctgactataggctggctgcccacccgcactgacagtaaacagcgtgcgaccatgaaacgcatttttgaacgccacgatgccgctcttatggctgccgtagcggtcgtgagcgaatttacgcgccagttttagcgccgcttcgttggcttccgcaccggagttacaaaagaagacgcgatcggcaaacgtggcgtcgatcaattttttcgccagtcgcagtaccggctcgttggtgtaaccgttgccggtatgccagaacttactcgcctgttcgttcagcgcttcacgcagttccggatgcgcatggcccagcgcgttcaccgcaatgccacccgcgaagtcgatatactctttcccctgctgatcccacaagcggctaccttcgccacgtaccggtataaagggtgccggagcgtaaacaggtatcatccattcatcaaagttttcacgcgtaattggctgagacatagcgacctctacagtaaataattcgttatttatatgttaataataagtaatgtttgcgctgtaaatgtagattgcagggttcgtgccagccagtgataaaagtgcataaacggcggaggctaactggaaatcaaggagttataaccaaaccatatgcatttaaagtgcatataaagtgaatacgtttgcgatgtgggtgaataaaaagaataaaaaacgcaatgttatgcagaagtaaaatataattctggaattgtgatcattgacgaaatttactggaaattactgcgccattctgacgcagcgcgcaccaaaagcgggcatttttttgcgccatcgttgacatcattaacaaccatcgatcaaatcacttaacaacaggcggtaagcaacgcgaaattctgctaccatccacgcactctttatctgaataaatggcagcgactatgaaatttgtctcttttaatatcaacggcctgcgcgccagacctcaccagcttgaagccatcgtcgaaaagcaccaaccggatgtgattggcctgcaggagacaaaagttcatgacgatatgtttccgctcgaagaggtggcgaagctcggctacaacgtgttttatcacgggcagaaaggccattatggcgtggcgctgctgaccaaagagacgccgattgccgtgcgtcgcggctttcccggtgacgacgaagaggcgcagcggcggattattatggcggaaatccccagtctgctgggtaatgtcaccgtgatcaacggttacttcccgcagggtgaaagccgcgaccatccgataaaattcccggcaaaagcgcagttttatcagaatctgcaaaactacctggaaaccgaactcaaacgtgataatccggtactgattatgggcgatatgaatatcagccctacagatctggatatcggcattggcgaagaaaaccgtaagcgctggctgcgtaccggtaaatgctctttcctgccggaagagcgcgaatggatggacaggctgatgagctgggggttggtcgataccttccgccatgcgaatccgcaaacagcagatcgtttcagttggtttgattaccgcagtaaaggttttgacgataaccgtggtctgcgcatcgacctgctgctcgccagccaaccgctggcagaatgttgcgtagaaaccggcatcgactatgaaatccgcagcatggaaaaaccgtccgatcacgcccccgtctgggcgaccttccgccgctaatttagcagctctcctggctcaaactgggtcaggagaattaaccttgagaaaaatcaacaaactgtcagtaatgatttgttgcctgccgtcctttgttataccgtctctgcgtttttagttgtctgaccacttctctattatcaagtttgatataggaaactccacgatgaacgctgagcgtaaatttctttttgcctgtcttatttttgcgctggtcatttacgctatccacgctttcggtttattcgatctgctcaccgatttaccccacttacagacactcatccgccagagcggatttttcggctatagcctctatattctgttattcatcattgccaccctcttgctgttaccaggaagcatactggtgatcgcgggaggaatagtttttggcccgctcttagggacactactcagtttaattgccgccacgctggcctccagctgcagtttcctgctggcgcgctggctgggacgtgatttactgctgaaatacgttggccatagcaataccttccaggccattgaaaaaggcattgcgcgtaacggtattgattttcttattctgacccgcttaatcccgttgtttccttacaatattcaaaattacgcttacggattaaccacaatcgccttctggccttatacccttattagcgcactcacgaccctacccggtattgttatttataccgtgatggcaagcgatctcgccaatgaaggcattacgctgcgctttattttacaactctgtctggcgggcctggcgctgtttattctcgtccagctcgcaaaactctacgcccgacacaaacatgtggatctgtctgctagccgccgcagcccacttactcacccaaaaaatgaaggataaaacgatgttgcaacattatagtgtgagttggaaaaaaggactggctgcactctgtttactggctgttgctgggcttagcggctgcgatcaacaagagaatgcggcggcaaaagtggaatacgacggacttagcaacagccaaccgctgcgtgtcgatgccaataaccatacggtaaccatgctggtgcaaattaatggtcgtttcctcaccgacgacactcgtcacggtattgtgtttaaagatggctccaacggacataaaagcctgtttatgggttatgcgaccccgaaagcattttatgaagccctgaaagaggcaggtggtacgccgggcgaaaacatgacgatggataataaagaaacgactcatgtcacaggcagcaaactggatattagcgtcaactggcaaggggcggcaaaagcgtattccttcgatgaagtgattgttgacagtaatggcaagaaactggacatgcgctttggcggtaatttaacggcagcagaagagaagaaaacgggttgcctggtgtgtctggatagctgcccggtcggcatcgtcagcaatgcaacatacacttatggtgcggttgaaaaacgtggtgaagttaaattcaaaggcaatgccagtgttctcccggcggataacacgctggcaacggttacctttaaaatcgccgaataaagccaggataaaggatgatgatgatgcaaagccgaaaaatctggtactaccgtataaccctcatcatcctgttgttcgctatgctgctggcatgggcgctgcttcccggcgtccatgagtttatcaatcgcagcgttgcggcgtttgccgccgtggaccaacagggtatagaacgctttattcagtcttacggcgcactggcggcagttgtcagcttcttgttgatgattttgcaggccattgctgcaccgctacctgcgtttttgatcacctttgccaatgcgagcctgtttggcgcgttctggggcggcttgctgagctggaccagtagcatggccggcgcggcgctgtgcttttttatcgccagagtgatgggccgcgaagtggtggaaaaattaaccggcaaaaccgtgcttgacagtatggacggctttttcactcgctacggcaaacacaccattctggtctgtcggttattgccttttgtccctttcgatccaatcagctatgctgccggtttgactagtatacgttttcgcagcttttttatcgccaccgggcttggtcagttaccggcaactattgtttattcctgggcgggcagcatgttaacaggcggtactttctggtttgtcaccggactgtttattctgtttgccctgaccgtggtgatttttatggcgaagaaaatatggcttgaacgccagaagaggaatgcctgatgggtttaccgccgcttagcaaaattcctttaattttacgtccacaggcgtggctgcatcgtcgccattacggcgaggtgctaagccccattcgctggtgggggcggatcccgtttatcttttatctggtgagcatgtttgttggctggctggagcgtaaacgcagtccgctcgatccggtagtacgaagccttgtcagcgcgcgcattgcgcaaatgtgcctgtgtgagttttgtgtggatatcaccagtatgaaagtcgccgagcgcaccggcagcagcgataaactgctggcagtggctgactggcggcaaagcccgctctttagcgatgaagaacggctggcgctggagtacgccgaagccgcaagcgtaacgccgccaacggtcgatgatgccctgcgtacccgactggctgcgcattttgacgctcaggcgctcaccgaactgacggcattgatcggcctgcaaaatctgagtgcccgttttaattctgccatggacattcccgctcaggggctgtgccgtattcctgaaaaacgttcttaaggagagatgatgcgccattgtgggtggttgctgggattgttaagcctgttttctctggcaacacatgccagtgactggcaagaaattaaaaatgaggccaaagggcaaaccgtctggtttaacgcctggggcggcgataccgcaattaaccgctatctcgactgggtgagcggcgagatgaaaacccattacgctataaacctgaagattgtccgtctggcggatgccgcagacgcggtgaagcgcattcagaccgaagccgcagccggacgtaaaacgggcggcagcgtggatctgctctgggtgaacggcgaaaacttccgcaccttaaaagaggccaatttattacaaacgggctgggcggagactctgcccaactggcgctatgtcgacacacagctgccggtgcgggaagatttttctgtgccgacacaaggtgcggaaagcccctggggcggcgcacaactgacgtttatcgcccgccgcgatgttacgccacagccaccacaaacgccgcaagccttactggagtttgctaaagccaatcccggcacggttacctatccgcgcccaccggactttaccggcacggcgtttcttgaacagttgctgattatgctgacgcccgatcccgccgcattaaaagaagcgccggacgatgcgactttcgcccgtgtcactgctcccttgtggcaatatcttgatgtgctgcatccgtatttgtggcgcgaaggaaaggatttcccgcctagtcccgcgcggatggatgctctgctgaaagccggcacattgcgcctgagcctgacctttaaccccgcgcatgcgcagcaaaaaatcgccagcggcgatttgcctgcaagcagttacagttttggctttcgcgaggggatgattggcaacgtgcatttcgtcaccattcctgccaacgcgaatgccagtgctgcggcgaaggtagttgccaatttcctgctcagtcccgatgcgcaactgcgtaaagcagatcccgctgtctggggcgatccttctgttctcgatccgcaaaaactgcctgacgggcagcgcgaaagtttgcaaagtagaatgccgcaggatctgccgccggtactggctgaaccgcacgcaggttgggtaaatgcgctggaacaagaatggctacaccgttacggtacgcattaatctttttgctgtgggcgatggtggcggtgatttatgcaccgctgatcccggcagctctcacgctgataagccctgctttgagcttgacacactggcaggcgttatttgccgatccacagttaccgcaggcattactggcaacgctggtgagcacaaccatcgcggcggtcggggcattgttgattgccctgctggtgattgtggcgctgtggcctgggccgaaatggcagcgtatgtgcgcccgtctgccgtggctgctcgccattccccatgtggcttttgccaccagcgcccttctgctctttgctgacggagggctgctttatgactatttcccgtatttcactccgccaatggaccgatttggcatcggtctgggcctcacccttgcagtgaaagaaagcgcatttctgctgtggatcttagcagcagtattgagcgaaaaatggctgttgcagcaggtcattgtgctggatagcctgggctacagccgctggcaatgcctgaactggctgctgttgccctccgtcgcgcctgcgctggcaatggcgatgctggcgattgttgcctggagcctgagcgtcgtggatgtggcaattattctcgggccaggtaatcccccgacgctggcggtaattagctggcagtggttaacccagggcgacattgaccaacaaacaaaaggcgcgcttgccagcctgctgttgatgctgttactcgccgcctacgttttgctgagctatctgctatggcgcagctggcggcgcactattccccgcgtagatggcgttcgcaagcctgccacgcctttattgccgggcaatacgctggcgatttttttacccttaaccggtgtgctgtgtgtggttctgctggcgatcctcgcggatcagagcacgatcaatagtgaagcgctcatcaacagcctgacaatggggctggtggcgacattcatcgctttgctcctgttactgctgtggctggaatgggggccacagcgtcgccagttgtggctatggttgcccattttattacctgctctgccactggtggcgggccagtacacgctggcgctatggctgaaactggatggaagctggacggcggtggtctgggggcatctgctgtgggtgatgccgtggatgctgtttatcctgcaacccgcctggcagcgcattgatagtcggttaattttgattgcgcaaacactgggctggagccgggccaaaatcttcttttacgtgaaatgcccactcatgttgcgccctgtgctgattgccttcgcggtgggatttgcagtcggtattgcgcagtatatgccaacgctgtggctgggcgcggggcgttttccgacgctcaccactgaggcggtggcattaagcagcggcggcagcaacggtattctcgccgcccaggctttatggcaactgctattaccgcttattatttttgccctgaccgcgttagtcgcaaaatgggtaggttatgtcagacaaggactccgctaatgctctgcgtgaaaaatgttagcctacgtttaccagaaagccgcttgctgacaaacgttaactttacggtggataaaggtgacattgtcacgttaatggggccgtctggctgtggaaaatccactctgtttagttggatgattggtgcactggccgaacagttttcttgtacaggtgagctatggctcaatgagcaacggattgacatcctacccaccgcacagcgtcagattggcattctttttcaggatgcactgttatttgaccagttcagtgtcgggcaaaatttactgctggcgctaccggcgacacttaaagggaatgcccgacgtaatgccgtgaatgatgcacttgagcgtagtggccttgagggagctttccatcaggatcctgccactttgtctggcggtcagcgagcgcgcgttgctctactacgcgcccttctcgcccaaccaaaagcgttactcctggatgagccattcagccgtcttgatgtggctctgcgcgataattttcgccagtgggtgttcagcgaagttcgcgccctggcgatccccgtcgttcaggtaacgcacgatctccaggatgttcctgctgatagttctgttctggatatggcgcagtggagtgaaaattacaacaaactgcgataacgcaaagtttttctcaatgcgtcagttcagaatggcgcactcaaaactacaatgtcgggattttcgatgaaacgtgtttctcaaatgaccgcgctggcaatggctttagggctggcttgcgcttctagctgggccgctgaactggcgaagcctcttacacttgaccagcttcaacaacaaaatggcaaagcgatagatactcgccccagcgcgttttataacggctggccacaaaccttaaatggcccttctggtcatgaacttgccgccttaaacctctctgccagctggcttgacaaaatgagcaccgaacagctcaacgcgtggatcaagcaacataacctgaaaaccgatgctccggtggcgctgtacggtaatgacaaagatgtcgacgccgtcaaaacgcgactgcaaaaagcaggtttaacgcatatctccatcctgagtgacgcgctaagcgaaccttcccgtctgcaaaaactgccgcattttgagcagctggtttatccgcaatggctgcacgacctgcaacaaggtaaagaggttacggcgaaacctgccggtgactggaaagtcattgaagcggcctggggcgctcctaagctttaccttatcagccatattcccggcgctgactacatcgataccaacgaagtggaaagtgaaccgctgtggaacaaagtttctgatgaacaactaaaagcgatgctggcaaaacacggcattcgccatgacaccacggtcattctgtatgggcgtgacgtatacgctgcagcgcgtgtggcgcagattatgctttatgctggtgtgaaagatgtgcgcctgctggatggcggctggcaaacctggtccgacgcgggactgcctgttgagcgcggaacgccaccgaaagtgaaagcggaaccggatttcggcgtgaagatcccggcacaaccgcagttgatgctcgatatggaacaggcccgtggactgctgcatcgccaggatgcaagcctggtgagcattcgtagctggccagaatttatcggtacgaccagcggttacagctatattaaaccaaaaggtgaaatagccggcgcacgttggggacacgctggtagcgacagcacgcatatggaagattttcataacccggatggcaccatgcgcagcgccgatgatattaccgctatgtggaaagcgtggaatatcaaaccagagcagcaagttagtttctactgcggcaccggctggcgcgcgtccgaaacctttatgtacgcacgcgccatgggttggaagaatgtttccgtgtatgacggcggctggtacgaatggagcagcgatccaaaaaatccggtagcaaccggtgaacgcggcccggacagtagcaaataacattgcaattactgacgctggaggctcttcagcgtcagatacccactccacacccgcgtaaaggtcgtcatccagcacaacgcaccgaagatccacgcaaaccacgcaaaccatgcagggaataaacatcccagcacaaacagtaagatcgtttctgtgccttcggttaatccccccagatagtaaaagctcttatgtgcataaccggggttatcaatctgatgttttgctgccagtgcagcaaaggcgagaaaactgctgcccgtgccgataaacgcaaacaacaaccagccgcctgccagcgcattttgctccggtgcagcaagaataaagccaaacggcaccagcgcgtaaaagagaaaatcgagagaaatatcaagaaagccgcccgcgtcggtaagctctctgcgccgcgccagcgcaccgtccagaccatcaagcagcctgttcaacaaaatgacgactagcgccgccagataccagcccagcgccagaaacggcagagccagcacgccgatggcaaatcccactaatgttaaaccatctggcgtaatgcccggtttatcaagaacccgcacgcactgatgcaacaacggtttaatccggggatgaagatggcggtctagcacaggcactccttaaatataaagcctttctgattgagcaacagtgcggatattatggcatttttcgcttatctgcccgtgtgtaatttatgaaaatgattgaagttgttgccgccatcattgaacgtgatggcaaaattttactcgcgcaacgccccgcccagagcgatcaggcgggattatgggagtttgccggtggtaaagtcgagccggatgaaagtcagcggcaggcgctggtgcgtgagttacgcgaagaactgggcatcgaagcaactgtgggtgaatatgttgccagccatcagcgagaagttagcgggcggattatccatcttcatgcctggcacgtacccgacttccacgggacgttacaggcacatgaacatcaggcgctggtctggtgcagtcctgaagaggcgctgcaatatccgctggcccctgctgacattccattattagaggcgtttatggctttacgcgccgccagaccagcggattaattatggctttacgcgccgccagaccagcggattagtgctaagggttttgtcatcacgctggcattgcagcagtattccttcggctttaattaccgccccttcagaataattttgatcctgataaacgcagcactgagtacagggctgcgcactctgcccgccactactgaacacttctggcggtacgtttacctccacgtccggacgataatgcgggttagccagtgcaattaatggaaatgctaatactacggcgaacaatgctcgactcacagggaactccttaacgttattgtctctgctactgataacggtagccgggtggcaaaactttagcgtctgagttatcgcatttggttatgagattactctcgttattaatttgctttcctgggtcatttttttcttgcttaccgtcacattcttgatggtatagtcgaaaactgcaaaagcacatgacataaacaacataagcacaatcgtattaatatataagggttttatatctatggatcagacatattctctggagagtttcctcaaccatgtccaaaagcgcgacccgaatcaaaccgagttcgcgcaagccgttcgtgaagtaatgaccacactctggccttttcttgaacaaaatccaaaatatcgccagatgagtttactggagcgtctggttgaaccggagcgcgtgatccagtttcgcgtggtatgggttgatgatcgcaaccagatacaggtcaaccgtgcatggcgtgtgcagttcagctctgccatcggcccgtacaaaggcggtatgcgcttccatccgagtgttaacctttccattctcaaattcctcggctttgaacaaaccttcaaaaatgccctgactactctgccgatgggcggtggtaaaggcggcagcgatttcgatccgaaaggaaaaagcgaaggtgaagtgatgcgtttttgccaggcgctgatgactgaactgtatcgccacctgggcgcggataccgacgttccggcaggtgatatcggggttggtggtcgtgaagtcggctttatggcggggatgatgaaaaagctctccaacaataccgcctgcgtcttcaccggtaagggccttagttttggcggcagtcttattcgcccggaagctaccggctacggtctggtttatttcacagaagcaatgctaaaacgccacggtatgggttttgaagggatgcgcgtttccgtttctggctccggcaacgtcgcccagtacgctatcgaaaaagcgatggaatttggtgctcgtgtgatcactgcgagtgactccagcggcactgtagttgatgaaagcggattcacgaaagagaaactggcacgtcttatcgaaatcaaagccagccgcgatggtcgagtggcagattacgccaaagaatttggtctggtctatctcgaaggccaacagccgtggtctctaccggttgatatcgccctgccttgcgccacccagaatgaactggatgttgacgccgcgcatcagcttatcgctaatggcgttaaagccgtcgccgaaggggcaaatatgccgaccaccatcgaagcgactgaactgttccagcaggcaggcgtactatttgcaccgggtaaagcggctaatgctggtggcgtcgctacaagcggcctggaaatggcacaaaacgctgcgcgcctgggctggaaagccgagaaagttgacgcacgtttgcatcacatcatgctggatatccaccatgcctgtgttgagcatggtggtgaaggtgagcaaaccaactacgtgcagggcgcgaacattgccggttttgtgaaggttgccgatgcgatgctggcgcagggtgtgatttaagttgtaaatgcctgatggcgctacgcttatcaggcctacaaatgggcacaattcattgcagttacgctctaatgtaggccgggcaagcgcagcgcccccggcaaaatttcaggcgtttaactgtatttaacggaacttgctccccacggaacatttcttatgggccaacggcatttcttactgtagtgctcccaaaactgcttgtcgtaacgataacacgcttcaagttcagcatccgttaactttctgcgatagcagcagatatgccagtaaagaaatcccatttgactatttttttgataatcttcttcgctttcgaacaactcgtgcgcctttcgagaagcaagcattatataatgccaggccagttcttcttcaattgtcccgttttgaaaagctgtgctacttatgctgatcatccaacttaattccgccgcccatattagcttcgcgctggatttaccggagctatgattagcgcaatcagagatatagtcactgggaaaaacagcaaatttattcaacaaggcgataacctgctctggggcttcctccatgtttgctttaaaggtattggctccatggtcgccagaaagaaaatgctccattaaggcacaataactttcgctatcttcgataccccattgatcctctaaagactcgcgtcttttacttatgatatcgatgctgtcaaaaggaagcacatgatattggaaggtatctttgccaggttcaggctttcgcggccagaactccagcgtttcagaccattgcttatgatagaatcgataaggtgcgatcaattgtagcgcctgtaacttctcgatactgagcggctcaatacctttagcctgataataatgcagttgttctttttttgctttaaaaccggcccgaacaataagccccatcataattaatagataaagaaaagagcatcccgcggtaatcaggcctctttcattcaaaccgttggatgttatcgctgcgaacacaaacattacagcgacaacacatgttaaataaaacccccacttacaaagcagcatggccttattttctttaatcatccgttcaaaattactattaaatatttcccagccattaaaagaatacttctcgctcccaggatggttttgtaataaaacttttttcatcacattccctgttattacatactttagaggcgataattttatccatgcaaaaaaaatatccaacgaattttcttgatccgctggatatttcagaatatgactcgaatagcacgaaagattcactcgcttacgctatcgccccgcttccgacttcatctgctggcggactttttttcgcactacgtttacgcggtgcagcctttttcttatcagcactgccaccactgcccggagccacaatgccgcgaaactgccgcaccggcgtacgtttggcttgatcaataagctgatatagcgtccccaccagcggctgcataaagtcctgatagcgacactgcttttcgctgatttgcgtcagcacgctttcccagtgcgcggtcatgtccggtcgcgtcgccatctccggcaggctatggaatagcgcttttccggcgtcggtggagtggatatagcgcccttttttggtcaggaaaccacgcttgaacaacagttcaataatcccggcacgcgttgcctctgtccccagaccatcggtcgcacggaggatctttttcagatctttatcctgcacaaagcgcgcgatcccggtcatcgcgctaagcagtgttgcatcggtaaaatggcgcggcggctgggtttgccgctctaccacttcacctttttcacacagcaactcatcgcctttcgccaccacaggcagtggcgtgccgtcgttttcttcatcgcgctctttgctgcctaacagcgtgcgccagcctgcttcagcaagaaaacgcgctttagcgacaaatttgcctttggcaatgtccagttcgataacacacttgcggaacaccgcatccgggcagaattgcatcagatactgacgggcaatcaggttatagaccttcgcttcgttctccgtcaggttgatcgcagaactccgtgcggtcggaatgatggcgtggtgcgcatcgacctttttgtcatcccaacagcggttgcgtatatctggatctaccactggctgcggcaacagatccggtgcatgaacactgatggcattcatcaccgcgtggcgtccggcaaaatgttcttctggcaaatagcgacaatcagaacgcggataagtgattagcttgtgcgtttcgtacagtttctggcagatatcaagcacgttctgcgcactcagaccaaaacgttttgccgcttcaatctgcaacgcactaaggctaaaaggcagcggcgcggattcactttcccgtttatcgttatagctggtgacaatagccggttgaccactaatgcggttaaccacatgctccgccagtggacgatgtaacaagcgcccttcttcatcctggtacggttcacacgcttcgctcggttgccagatagcggtaaaccgctcatcggcaggtgtcacgatatgtgctttgacttcaaagaagtctttcgccacgaagttttcaatctcttcatcgcggcgcaccaccagcccaagcacgggcgtctgcacgcgtcccacggaaagtacgccctgataaccggcattgcgaccgagaatggtatacgcacgggtcatattgatgccgtacagccagtcggcacgcgctcgcgccagcgcagaaacgcacagcggtacaaactcactgttggaacgaagacggtcgatcgcccgctcaaccgcctgcgggttcaggtcgtttatcaagcaacgctgtacctgctggcgcttttccggtgccagttgcagatagtccagcacttcatccaccagcaattgcccttcacgatccgggtccccggcgtgaacgatttcgctggcttcatgcaggaaccgtttgatgacgttaagttgtttggtcacggagggtcggggctgtaattgccacttttccgggacaatcggcaaatccgcaagattccagcgcgcatagcggctgtcgtaggcgtctggctgcgcctgctcaagcaggtgaccgatacaccaggtcaccacctgaccattaccgcactcgataaagccatcgcctttccggtgcggtttgggcaggacatcagcaatggcgcgcgccagactcggtttttcggcaataaacaaccgcattgaattaacgaatctcaaccatggcacgaccgccgcgcgctggcaccagttcgccaattgccgtcagttcaatgccaaactcggcggctgtagctttgacctcattttctgcttccggcatgaccgccagcagcaaaccgccagaagtttgcggatcacacagcagatcgcgcacttcacgcggcatttcacccatcagatgaccgtagctggcaaagttacgttcagtgccgccaggtactgcgcccaacttaatgtactcttcaacaccggggagtttcgggatcgcttcatagtcgacgcgtgcctgcacaccagccccctgacacatttcgctcaagtggcccagcagaccaaagcccgtaacgtcggtcatcgcttttacgccttcgatgttggcaaaggacgcgcctgcgatgttcatccggcacatcacttccgtcgccagtccctgatgttctggtttcaacagactttttttctcagccgtggtaagaacgccgatccccagcggtttcgtcaggaacagtttgcatccggcttgtgcggtactgtttttcttcacccgctcggtcggtacgatccccgttaccgccagaccaaaaatcggctccggcgcatcgatggagtgaccgccagccagcgcaatacccgcctgacgacatgcatagcgtccaccttcggtcacttcgcgggcaatttctggggaaagtttgttaatcggccagccgaggatcgcaatcgccataatcggtttgccccccatcgcgaagatatcgctgatggcgttagtcgccgcaatgcggccaaaatcgaaaggattatcaacgatcggcataaagaagtcggtggtactgataacgctggtgccattgcccagatcgtacaccgccgcatcgtcgcgggtttcattacccacaagcaaattcggatcaacaaacttcgcctgctcactatgcaggatggtttccaacacttttggggaaattttacagccgcaaccagctccgtggctgtattgggtcaaacgaatgctgttctcgctcatggacatctcctgtcaatgcaatccgggtatggtaaccctcattccgtgaagtgataagtgagagtgtctgaattcctgcgcctttgctcacaatccagacagtttcgcgacaattatcagaaataagttacaaacggcgtcgggtccgggacgttaatgctcgtagatgctttcagctgcggcgtaccgaggtagagaaaaccgacaattttatcctgctcacggcaaccgaatgcttcacgcactaccggactttcagttaatgcgccactgcgccagatgccgccaaacccctgggcaactgctgccatttgcatcgccatgaccgcgcatccggcagacatttcctgttcccagcgcgggactttatgattctcttcgcatttcgccaccaccgtgatgatgagcggtgcgcggaacggcgcattacgggctttgtcgatagctttgtcatcactaccggcagcaatcgccccctgttccagtacggcgctgaaacgctcgcgcccttccccttcaatcacaaaaaaatgccacggttgcatggacttatggtccggcgcacgcatacccgcacgcaggatgttttgcagttgttcacccgttggcgcgggttcagccaagcgggaggcgctacggcgattgatcaatagttcgagtgcatccatttgattaactcctgtcgtgatatttattcacaaaattaacacgagagtggattttgttacagcacagtccgcaattcctgctgacaagtaccggttgggtcattacgataaccacatctattgcgcctgtgacaggtgtgaccttaagttgggagaatacatgcgaaccctttggcgatttattgccggattttttaaatggacgtggcgtctgctgaatttcgtccgtgaaatggtacttaacctgttctttattttcctcgtactggttggtgtggggatttggatgcaggtcagtggtggtgatagcaaagaaacggccagtcgtggcgcactgctgctggacatttctggtgtgatcgtcgataaacccgacagttctcagcggtttagtaaattaagccgccagctgcttggtgccagttccgatcgtctgcaggaaaacagtctgtttgatatcgtcaacactattcgccaggcgaaggacgaccgcaatatcaccggtattgtgatggatctgaaaaacttcgcaggcggcgaccaaccgtctatgcagtacatcggcaaagctctgaaagagtttcgtgacagcgggaaaccggtttatgccgttggcgagaactacagccaggggcaatattatctcgccagtttcgccaataaaatttggctgtctccgcaaggcgtggttgatctgcacggctttgccaccaacggtctgtactacaaaagcttgctggataagctgaaagtttccacccatgtgttccgcgtgggtacgtataaatctgccgttgaaccgtttattcgtgatgatatgagtccggcagcccgcgaagctgacagccgctggattggtgagctgtggcaaaactatctgaatactgttgccgctaaccggcagatccctgctgagcaggtattccctggcgcgcaagggttgcttgagggtttaaccaaaaccggtggcgataccgcgaaatatgcactggaaaacaagctggtcgatgcactggcaagcagtgcggaaatcgaaaaagcactgaccaaagaattcggctggagtaagactgataaaaattatcgcgccatcagttattacgattacgcattgaaaacgccggcagataccggtgacagcatcggtgtcgtctttgctaatggcgcaattatggatggcgaggaaactcaggggaatgttggcggtgataccactgcggcacaaatccgcgacgctcgccttgacccgaaagtgaaagcgattgtcctgcgtgttaatagcccaggcggcagcgttaccgcgtctgaagtgattcgcgctgaactggcagcagcccgggcagcgggtaagcctgtggttgtaagcatgggcggcatggcggcatctggtggttactggatttccacgccagctaattacattgtggctaaccccagcaccctgaccggttctatcggtatcttcggcgtgatcaccaccgtagaaaatagtctggatagcattggtgttcatactgatggtgtcagtactagtccgctggcggatgtttctatcaccagggcactgccgccggaagcgcagctgatgatgcagttaagcattgagaatggctataaacgctttatcacgctggttgctgatgcgcgtcatagcacgccggagcagattgataaaattgcccagggccacgtctggaccggtcaggatgcaaaagctaacgggctggtcgatagtctcggggatttcgatgatgcggtcgccaaagcagcagagctggcaaaagtgaaacagtggcatctggaatattacgttgatgaaccgaccttcttcgacaaagtgatggacaacatgtctggttctgtccgggcaatgttgccagatgcgttccaggccatgttacctgcaccgctggccagcgtagcctctaccgttaaaagtgaaagtgacaagctggccgcgtttaatgacccacaaaaccgttatgcgttttgcctgacctgcgccaacatgcgttaagtcttgtactgagtggccgacagatcgtcggccacattattttttacgtcgacgaatcctcttcccgctgtttcgccccatatttccttatccgcatagtatcaggtgcgctccccctgcctcacgtatatacttttgctctttcgatatcattcatatcaatatcatgcaaaagaaaagtatttacgttgcctacacgggcgggaccatcgggatgcagcgttccgagcagggttatataccggtgagtggtcatctacaacgccaactggcgctgatgccggaattccatcgcccggagatgccagatttcaccattcatgaatatacgccgctgatggattctagtgatatgacgccggaagactggcagcatattgctgaagatattaaagcgcactatgacgactatgatggttttgtcattctgcacggcaccgacacgatggcgtataccgcctctgcgctgagcttcatgctcgagaatctcggtaaaccggtcattgtgacagggagtcaaatcccgctggctgagttacgctctgacggacaaattaatctgctgaatgcgttgtacgttgcggcgaattatccgatcaacgaagtaacgctctttttcaataaccgattgtatcgcggcaaccgcactaccaaagcccatgccgatggttttgatgcgtttgcctctccaaaccttcctccgttactggaagcaggtatccatattcgtcgtttgaatacgccacccgccccgcacggtgaaggggaattaatcgttcatccaatcaccccacaaccaattggcgtagtgacgatttatccagggatttctgctgacgtcgtgcgcaattttctgcgccaaccggtgaaagcattgattctgcgctcctatggcgtgggtaatgcgccacaaaacaaagccttcctgcaggaattacaagaagccagcgatcgcggtattgtggtggtcaacctgacacaatgtatgtccggtaaagtgaacatgggtggttatgccaccggtaacgccctcgcccatgccggcgtaattggcggtgcagatatgactgtagaagccacgctaaccaaactgcattacctgcttagccaggaactggatactgaaaccattcgcaaggccatgagccaaaacctgcgcggcgaactgacgccggatgattaaggagactgtaatgccccctcgcgccctgttactggtcgatttacaaaatgatttctgtgctggtggcgcgctcgccgtgccggaaggtgacagtacggtggatgtcgctaaccgcctgattgactggtgccagagccgcggtgaagcggttatcgccagtcaggactggcacccggcgaatcacggcagttttgccagtcagcacggtgtagagccttatacgccaggccaactcgacggtttgccacaaaccttctggccagatcactgtgtgcagaacagtgaaggcgcacaattacatccgttactgcaccaaaaagcgatcgcagcggtgttccataaaggcgaaaatcctttagttgacagttacagtgccttttttgataacggccgtcggcagaaaacctctctcgatgactggttacgcgatcatgaaatcgatgaattgatcgttatgggcctggctactgactattgcgtgaagtttaccgtgctggacgcgttacagttaggttataaggtaaacgtgattaccgatggttgtcgtggcgtgaatatccagccccaggacagtgcgcacgcgtttatggagatgagtgcagctggggcaacgctatatacgctggcagactgggaagagacacaggggtaattttacgctggcctacaattctgtactggcattgtaggccaaataaaacacgtcagtggcacatctggcaattgatgccatcaacgaaagatttaattcacctcagaaatctcttccaagctcaccttccgcgtttcgatgccaaaaatggagagaaccagcgcacagagcaataacataacaccaagtaccataaacaccgtgatgctcccataatgtgttaataatgccgcaacgccatagggcgtgaagactgcgacgatccgtccgacggcattaacgaaaccgctaccgcgcaggcgtaaatgcgttggccaaagctccgggatataaaccgcgctcgcgaagcaaacatacatgtataaaaagaagatcatcaccagtccatagattaaaatcgcccactctgtagtctgaatactatagatatagcctaacacggcaataataataagtaaggtggagccaaataaccgacgaggaaaatgatcaataattaatgccgcaataaatattcctaccggagcgccaatcataataacagcggtcattaatatacttttatcgacatcaatgccggagttaacaaatatggtcggtatccatacggtgatggtataaaggctaatgttcattgcaattaaaacagtaatcgcgactaatgtacgtcgtaacatttcacctttaaacaggagccagaaagtacccttgattactttaaccttgctgttgctctgatagctagtaagcgggggtaaacgaatactcttctctctttcaatttgctgctctacttcacgaagttggcattctgcacctgcgatttgccctttccctgccagccatcgtgggctctcgataaagtatttaccactgagaaaccaggctaacagtatgccaataccacccagcagaaacattattcgccaactaaaaaaagcgataaccaccacgcctatcgccgcagacagcatggggctccagttaccaacaaaactgagccgcgcggaccattttccacgcaccgtcgcggggataaactccgtaaaactggcatagccaaccataatcagcgcccccattcctgttcccatcaggaagcgaaagaagatgagccagtacatatcagggacaaaagcggcccctgttgcagcaataccgacgatgagaagatttatgcgaaacgccctgcgccgcccaaagtagtcaccaataaacccaccagtaagactgccgatgaaataaccaaacattaatgcgctggtaaaggcggcattgaggaaattattactccatccattgcttaccagctttgctaagacgacattaccggagtaactcaaaaaccctgttaataacagactaaagcttataataccaaatatacgataatgaaaccgggccaaaggcaagcggtccagtcttgcgccaatttgatcatattgttccattaggtgcctcggatttgctaaaaaggtagcaattgcggcaaattcacttgccgcatctttatcatcattttatttcaaggcgcaggaacaaataatattgacaacgtgtgcttaaattaccacaccagctggatattattgtctttgcaaaatgctatccactctgcacccggacttttatcagttattatgtaattaatatgactaaaatcagctaactggacaaaagctttgcgatcaaacttagagtgatcaaccaataacgcaacttctgtcgcctgacggatcattgtctttttgatttcagcttccgcttcattagagtccagcgcgccgctgttaatatcaagacctttacaactcattaccatgatatcgacatgatagcgcctgatgatctctttagtaattcttccttgcagactaagtgtatttttgtttagttccccacccgtactaacgactttaatttcactctgagccagaacatgaatcgcttccgcgctgttggttagcaacgtcaggccactacggtcctgtaacaatttgagcaattccattacggtactactggaatcggctgccatggtggttttattgtcgataaagggtagtgccttgcgtgcaataagctgcttctcttcataaaagctactagcgcgcttataaaaatggatattctccgtcaacatcgctgtatttaaaacagcaccaccataggttctggtcaaaaagccttcatcttccagcttctcaagatcgcggcgaatggtttcttcggttacctgaaaaatcccactcaaattactgactgtcacctttttatcgttggcaaccatttgcttaattgcctgaatcctgtcttttgccgccacgattacacccctgtatctttttacatcacattagcgcgattatcgcataaccgatgtttactttcaaaataacctgtttgaatcacagattttcatcacagttttcacagaaacagaggtgaatcgtgttgagtatttaacgctccagggcctctgccatttccctcatcaatgttgcgtctgcatcgcttaagttgatattcagtgccgcgacattttcgcgtacctgttccggtgcagtagccccactaagaatggagattaaatcactctgttttaatatccacgccagtgccagagtgggaattgtgcactgataacgagcacaaagtggctgccactgttcaagcatatcaatcactttcagcatgttttcacgctggaaccagactttatttgcccgagcgccgcccggaacgtaatcacgagtgatggtgccggtcaacaatccctgctctagcggggaataaacctgaaccacaatgccattatcacgacatagtggcagcagttcgttttccattgcccggtcgaggatactgtatttcgcctgaataatatccagttcaccatattgcagatactcgcggatatggtcagcatcgacgttagcagcgcctatagcgcgaattttcccttcagactttaactcattaagcactgcgacagtttcagcgatcggcgtaaaaaatggcggcacgctctgccagtgcgtcatgtagatatcgatgtaatcaatacccagacgttgcaagctcgctgctacctcttcgcggatagattccggggaaaggtttttatacaactgccgatcgccaactttgttgaataaacttccttttcgttcccagacaatgccgcatttggtttctactacaacctgttcacggggcagtttttttaacgcctgaccgacgataacttcactattgccaaagttatatcctggcgcagtatcaatcagattaatgccacaacgatgggcttcaagaatcgtatcaatacatatttgccgatcgagatcgccattccatgcaggaccgccgccaatggcccatgtccccaaccccattcggctaagcgtaatatccgttgtgcctaaaggtatctttttcatttgccttcattatccttcgtattcttccagcaattgttcgaccagctttctgttttttacgccggtggtggcaccgacgcttagaacgctgatagccgccgttgcattggcaaagcgtgcgcattcacgcagatttttgccttctaacagtgccgcaataaaaccactagcaaagttatcgcccgcgccaatggtgtcgatggcggttattcctgcgaccgccggcaccttcatcgtcatgtcaccacgcttgataaagcagccgtctttacccgttttaatcaccaccgtttttacgccgcacgcaagaaagcagtcagcaatttcatccagtgtctctttcccggtgagtaattttgcctcggcaaaattaggaaacagataatcgacataactcaatgcttcgcaaatatcatccagcgtttcattcaaccgcggtttgatcatatcggcacagataatcatctgccgggctttagcttgcgtaaaaatttctgttagcgctttaccatccaatagtggactgttgaaaatactggccagacttaataatttcgcctgagaaaaccgcgcaaaatcaacatcgtcaatattcaatttccacagactgccattacggtttgtgacaaacgtccgctcgccatcctccgtcaccagtccaacgttaatagaggtatctatgctgacgtcctgcttcaggctttgaatatcaatattctctttgcggcaatggtcgagaataaattgccctgcggcatctttaccaatacgactcattaatgctgtgcgatggcccagacgagaaataattgttgcttcatttattgcatcacccccggtggtcattgcgattctttcaagaggataagaatccacatcaaagatatttttactgaccggttgcaatggaatatcaacaatagcggcacctatacaaataacgtcgagattatccatatcattattccgctttgccatcagaaccgaacagtttaattttttccaatgcccgttcttttacagctttacgtacttcacgttctaaatgcaggaaaggctgatcctggttttctttcactgcaaccattgcggcctgacagagctccgtatgaatgttgattttcgcgatacccaagctaattgcagttttaatgtcggcatcactgatcccgcttgcaccgtgcaaaaccagcggaacagaaacggcatcgcgtacgcgtttgacgacctcaaagttcaattgtggctcactcgtataaaccccatgctggttgccgatggcgacagccaaactatcacagcccgtacgttcaacaaattcagccgcctggtcaggatcggtatagtgatagcccgccagcgcttcctcataaacggtttcattaccgacatgccctaattccgcctctaccggaatacccagcggatggaagaaatcgacagcctctttggttaaacgaatattttcttcgaaatcaaacgcggaagcatcacgcattaaactattcataccatgagtccaggcgttatgaataatctccatactccgaccatgatcccaatgagttattaccggcaccgttgctttttgtgccatacttaccatcatgtgagagaaatcttcaaaactggtgttaccgacaaaacctgtaccaaaagaaataataaccggggatttcgcttcttcggctgcgtcgataacgcccatcaacatttctgcattccatacgttaaaatgggcaattgcataatgtttatttgtggcatcgttttcccaatatctgatatctgcgagcatgttctgttctcccgtattaattaatcgctaattttaataacgcctttaataatgtcgcgtttgttgttaacactctcttcaaatgcctgttgtacatcccgataatcgtaaatatgcgtcaccatgcttttcacatcgaatcgcccactagaaatagcttcaatcgtgaccggataacgattggcatagcggaataccgtctggatagtgacttcgcgattgattttgaggaaattgattgcgctatcgccgggtacagtaccaacaatcataattttaccgccgcgcattaccagataaggtgcctgtttaacggtgaccgcagaacccgctgtttcgaaaacaatatctgcgcccatgtcttcggtaaattgctgacagcgtgcaatagtgtcttcttttgcgccgttaataaccactgtcgcaccaagctgttccgccattgccagacgtttttccagcacatcaacgacggcaatttccgttgctcccaggcatttgcacgcttgcaacgtcatcaaaccaatacaacctgctcccagaataattatcttcttacccggtttaacatctgccagcatcgcggcatgcatcccgactgcggcaggctccaccagcgccccttccatcgtgtccatattgtcgggcagtttgtaagtaaagctctccggatgacacagatagtgcgttaatgcgccgcggtagttgggttgtgtcgccataaaatcaacgtccgggcagatgttatatttgccttccagacagtaacgacagtgaccgcaaggaacgccaggttcgatatttacccgatcccccggtttaaatttgcgcacgcggcttcccacagccacaaccgtcccggcgcattcatgacccaggccaatttcttgatttgggtctttaggcggaataaacgggccactttcaaaaccatgtacatcactaccacaaataccgacatattctactttaatcaaaacttcatcttctttaggcactggtatttctgcactaataattttcattgtgcccggcacctgcaatattgctttactatttttcattttgaatccacccgtattatttattggctactgcatcaatacttaaactttcaacggagacacctttggtttcgattccaatggtggcgatagcaattgcgacaataatactaaccgcccccagaagaataaagactcccgtaacgccataactactgagcagcactgcaacggcataaggtgcggcaataccactgattcgccctaccgcattcgccagaccggagccacggagtttggcctctgtcggccagatttcagggacatacactgcgctggcatagcaagcgtacatatagacgaaagtaatcaggaagaaaccaatcaacgttatgagcaacatactggtttgcagactatagatatatccgagcaccgcaatcaggattaatagccccacacccattgttttacgcggaattttatccatcaccagcatggcaataaaaataccaaatggcgcgccaaacatactcatggtatttaaaacaatgctgtcttttaaattaatcccctgggtcatgaatattgttggcaaccagttaattagtgtgtactgcacaacgttcatggcaatcagcacacaagagcctaatatcacgcgtttcagtaatactcctgtcagtaaggcactatacggcaccgcttgtggcgctttaccgtcatcagcaataaccacaggcggcaaaggtttacccgtctggcgtatgacgccttcttctatactccgcatgactttctcggcttcctgataccgtccgcggctttccagccagcgcggggattcaggaaagtagcgccaggccagcgccgtagcgataaggctcaatattgcagggataagcagttgtacccgccagttccactctgcactaatcagcggcgtgagtcccatcgctatcaaactacagagcggataactccagttgccaataaaggaaacccgactactccacgttccacgatttctaccgggcatatattcggtgaaaccagcaaacagcgtaaccagtaaagctcccagcccaactcccatcacaaaacggcaggcaataaggaaatccatattcggactgaaagcaccgacaaccatgctggcaatatgaatggcctcatagaggatgaacgcatttctgcgaccggttttgtcgccaatgatgccgcccaccagcgcaccgagaaacattccggcggtcgtgattgcactgaatgtggctgtggtggaattatctgtccagcccaacgctttcagctgcgcgaggatcaagccaccaacggcattactccagcagacaagcaagccaaacgcgacgatggcaaacatactactatgccagcggcaatccggtaagcgatccagccgtgcaccacaatgcggttttgttatctgttccatgcgataacgttccttcaggagagtggttattcatcaaagtcgtaagtcatgatcactttgattgcggttttatcgaccatcgcatcaaacccttcgcgccattggctcaggccgatacgatgcgtgatcatcggtttgactttgatagcgccgctggctaatagcctgatagcgttacgccaactggtggagtcataggccatatgcccaatgatgcttttgttccaggcggtaatgtcattaatgctgaaatcaagaggtttgaagcccattccaacgcgtaccacttccccgttcgggcggagcatttcgatggcttgtttcagtgcgatattggcaccggagcattcaatcaccagtcccagattgtctttgccacaaatttgctggcagcgcgccaccacatcttcggtagaaccatttactactgccgtcgcacccagttcttttgcaaccgggaagcggaccgccacatcttcttgcagaccaacgacgacgatatttaccgcccccataattcgcgccatttgtacggagaacagcccgagtgggccagtgccgatgacgaccacatcctgaccaggaaggaatttgctttgctgcgcgatggatttgtaggcattacagatagggtcaagtacggctgcgtcctcataatcaacaccatcagggatttcccacaacgcatgacgatgaattttgagaatttcaccaggaaccagacaatatttggaaaaaccaccgccccaggtattattatccagaccaaggtttactttttctgtacaacacagaaaatcaccttgttcacaggccggacaaacaccgcaaacgtgaccgctgttatcgcttacgacgcgttgccccactttccagtctttgactttttcaccaacctgcgcaatacaacctgcgaactcatggccgcggatagagttaaactcatcagaaccgctatcgacattgtagtgcttcatgtctgcgccgcagattgccgcggctttaatttcaatcactacatcttccgggccacacatgggttgtgggacatcaatcatcttgtagccgccaaaggccttgccaaaccgagccagtgctttcattgcgtcatcctctgtgtttagttttgcttagatggccatcatacttacccacatgatttttgaggtcaacattaaatctgtaaaacacagataatgatctgcgttttacaactcagatcacaattacgcagaaaatggctgggtctgttacaggttgatggaaggcggggcgcaaaaagagcaaattcgagagggattaccggccaaataggtctgagacttaagttcaggagaagtcattcaggtgtgaacgggacggcaagagatcggactgggacttagccaggtcatggcgagataattgagatgagtcgtggggtcattgttggctatccccttcatagccgaggcaaaaaggggatgaaccacttacttaaacatggcaataggctttgcactgataccaaaatcttcttttaactgctgtttgctcttcatgaccatctgaccatttgtgtcaattgtcatatgctgtgcttcgatattatggcgggcttgccacagcatcaccagttgcaggcagttctctttttgttcctcggtcaacgcaacgccatcaggccatttccccagttcaacggcggtgctcaaacgctggtatacctcaggcatcatgctgttgataatgtcatcaagattcataatttttccgctcctgtggaataagttgctgaatcgttttttcaaccgttgatttcttcgccgttttcgccatcggtaaagcgtaaagaggcagagttaacacaataacgttcgcccgttggctgcggcccgtcggggaagacatgccccagatgggcatcacagttaccgcaacgaatttctatgcgctgcattccatgactcaagtctttgatataacgaatggattcttcacttaccggttcgtagaaactgggccagccacagccggaatcatacttggtttgggaatgaaacagcggggcatcgcagatcaaacagtgatatacgccgtcacgcttgttatgcagtaaacgacccgtaaatggcggctctgtcccatgattctgcgtcacgtaaaactgcatctcggacaaattttttttcagttcttctgcgctaggtttattagccatttgctcacatctcactttaatcgtgctcacattacgtgactgattctaacaaaacattaacaccaactggcaaaattttgtcctaaacttgatctcgacgaaatggctgcacctaaatcgtgatgaaaatcacatttttatcgtaattgccctttaaaattcggggcgccgaccccatgtggtctcaagcccaaaggaagagtgaggcgagtcagtcgcgtaatgcttaggcacaggattgatttgtcgcaatgattgacacgattccgcttgacgctgcgtaaggtttttgtaattttacaggcaaccttttattcactaacaaatagctggtggaatatatgactatcaaagtaggtatcaacggttttggccgtatcggtcgcattgttttccgtgctgctcagaaacgttctgacatcgagatcgttgcaatcaacgacctgttagacgctgattacatggcatacatgctgaaatatgactccactcacggccgtttcgacggtaccgttgaagtgaaagacggtcatctgatcgttaacggtaaaaaaatccgtgttaccgctgaacgtgatccggctaacctgaaatgggacgaagttggtgttgacgttgtcgctgaagcaactggtctgttcctgactgacgaaactgctcgtaaacacatcaccgctggtgcgaagaaagtggttatgactggtccgtctaaagacaacactccgatgttcgttaaaggcgctaacttcgacaaatatgctggccaggacatcgtttccaacgcttcctgcaccaccaactgcctggctccgctggctaaagttatcaacgataacttcggcatcatcgaaggtctgatgaccaccgttcacgctactaccgctactcagaaaaccgttgatggcccgtctcacaaagactggcgcggcggccgcggcgcttcccagaacatcatcccgtcctctaccggtgctgctaaagctgtaggtaaagtactgccagaactgaatggcaaactgactggtatggcgttccgcgttccgaccccgaacgtatctgtagttgacctgaccgttcgtctggaaaaagctgcaacttacgagcagatcaaagctgccgttaaagctgctgctgaaggcgaaatgaaaggcgttctgggctacaccgaagatgacgtagtatctaccgatttcaacggcgaagtttgcacttccgtgttcgatgctaaagctggtatcgctctgaacgacaacttcgtgaaactggtatcctggtacgacaacgaaaccggttactccaacaaagttctggacctgatcgctcacatctccaaataagttgagatgacactgtgatctaaaaagagcgacttcggtcgctcttttttttacctgataaaatgaagttaaaggactgcgtcatgattaagaaaatttttgcccttccggtcatcgaacaaatctcccctgtcctctcccgtcgtaaactggatgaactggacctcattgtggtcgatcatccccaggtaaaagcctcttttgcattacagggcgcacaccttctcagctggaaacctgcgggtgaagaagaagttctgtggttgagcaacaacacaccgttcaaaaatggcgtcgctattcgcggtggcgtaccggtttgctggccgtggtttggtccggcggcacaacaaggtctgcctgcgcacggttttgcccgcaacctgccgtggacgctgaaaagtcatcatgaagatgctgatggcgtagcgctgacttttgaattgacgcaaagcgaagagacgaaaaaattctggccgcacgactttacgctgttagcgcatttccgcgtgggtaaaacttgtgaaatcgatcttgaaagtcatggcgaatttgaaaccacctctgccctgcatacctactttaacgtgggtgatatcgctaaggtaagcgtcagtgggctgggcgatcgcttcattgataaagtgaatgacgcgaaagaaaatgtactgaccgatggtattcagaccttccctgaccgtaccgatcgcgtgtatctgaatccacaagattgcagcgtgattaatgatgaagcgctgaatcgtattatcgccgtaggccaccagcatcatctgaacgttgtcggctggaacccgggaccggcgcttagtattagcatgggcgatatgccggatgatggctacaaaacatttgtttgtgtagaaacggcttacgctagtgaaacgcaaaaagtgaccaaagagaaacctgcacatctggcgcaatccattcgcgttgcgaaacgttaatttacgttaatgttgtgtgccgggtgcaatgcatccggcacacaacatcacaccatatccagcgcagtttttccttttggtgccggatatgccttatccagcatagctaattccgcactagaaagttcgacctcaagcacagccgcattttgttggacatgggcaatcgtggccgcttttggaatcgccatcacaccctgatgactgatcacccacgccaacaatacttgtgccgcgctgatattgtgagcatgtgcaatttcgttgactaccgcgttttttaacagtccattgcgcaaccgcccggcctgggctaacggactgtaagccatcaccggcatctgctgttgctggcaccaggggagtagatcgtactcaattcctcgactaccgagatggtaaagcacctgattagtggcacactgatttccccccggcagctgccagagttcctgcatatcagcataatcaaggttagaaacgccccagcggcggatttttccctgggcgatcaatttttccatcgctgcgacagtctcttcaaaagcgaaactgccagaccagtgtaataagtaaagatcgagataatcagtattgagacggcgtaaactggcttcgcatgcatttatcgctttttgcccgccagcattccacggatagactttagagacgagaaagaccttctctcgcagaccggttaatgcttccccaaccaccttttcggcaccgccatcggcatacatttcggcggtatcaatgagggttaaaccgagttcaatgcccgcgcgtagtgcagcaacttctgttttgcgctgactggcatcttcgcccatataccatgttccctgccctacggctggcagactgacatcgccactaaattgaatcattttttgttgcattgtttcctcccaggtattgcaccaccgtaatgcaaaacagggcgtgacgccctgtttttatgcacaaaatgccctggaaagatgcattatcagaatttgtaggtgatcccggtagaaatcaggccagtccaggatttatccaccatcgggctgtcagtaacttcatcagacagacgggtgtagcgtgcggtaccgtaaacactccagtcgccgaggaagttgtagctggcgctcagctccaggtaagggctccagctgtcgttcgggttatagccacgcagaccgctgcgagcggactctttgcggcttacgccataatagtattcgttctggttttcgctgttccactgcacaccaatacccggagtcacggtcaggccaccgttggtgtaacgatacaaccaggccatatcccagacgatgccgttgctgttatccagggtatcgccagccagggtggtacgcaggtaaccgtactgggtaaagtgagcataagacagaccagccatcatggtgctcttacggtcatccaggtgacgcatttggtgatcgccactgtctttcgctttgaagtaaagcgggctccagtaagcggtaatactaagtttatccgttgcgtcattccacaggtagtaaccaccacctaagccacggaaccagaagttatcgccttcatagttgattaccggtactgggtaaacatcggtatcgtaatctttatatgggtgttcaacgacacctacgcctgcgcccagggaaaatttaccttcagcgtgcgctacgcctgcagacgttgcgataagcactccaagtgccagaagtttgagtttggtcacaattaatcattccttaaacaaatgtttagcgggcgacaaagtttacccgtcaatacatcgaaacccaacctttttacgttttcattttttaaagtaactgtttaattttcctgacgcggatgacaccgcgcttacagccaaatgaatttagcgttactggcgagcctggtctttacattaattatgcaaaatttatggatgagttgttgatatgccattgaaattaagaaagccgtgcaggcaagttttccatttgccatctacgcttaattttgaaggtgtatcaccgggcacgttgttctcatcgtcgataaaatggcatgagagttgctgtgttttagcaagagacgtcgttcagtttacctcttccgggagcctctactattcatatgaacggctcttaacctgtgctaaaaaacgaaaggacggcataccatgaatatattcgatcactatcgccagcgatatgaagctgccaaggacgaagagttcacactgcaggagtttcttaccacttgtcggcaagatcgcagtgcttatgccaacgcggctgagcggctattgatggctatcggtgagcctgtcatggtcgatacagcccaggaacccagactttctcgactcttttctaaccgggtcattgcacgttatccggcgtttgaagagttttacggcatggaagacgcgattgaacagattgtctcttatctgaaacacgcggctcaggggctggaagagaagaaacaaatcctgtatctgctggggcctgtgggtgggggtaaaagtagccttgctgagcgactgaaaagtttaatgcagctcgtaccgatttatgtattgagcgcgaacggtgagcgtagcccggtcaacgatcatccgttctgtcttttcaatccgcaggaagatgcgcagattctggaaaaagagtatggcattcctcgccgttatctcggcaccatcatgagcccgtgggcggcaaaacgcctgcatgaatttggtggcgatatcactaagttccgggtagtgaaggtctggccgagtattctgcaacaaattgctatcgccaaaacggaacccggcgatgagaacaaccaggacatctccgcgctggttgggaaagtcgatattcgtaaactcgaacactacgcgcagaatgacccggacgcctacggctattccggtgcgctgtgccgcgccaatcaggggatcatggaattcgttgagatgtttaaagcaccgattaaagtgctgcatcccttgttaaccgccactcaggaaggtaactacaacgggacggaaggtatctccgccctgccgttcaacgggattattctcgcacacagcaacgagtccgaatgggtcactttccgtaataacaaaaacaacgaagccttcctcgatcgtgtttacatcgtgaaggtgccgtattgcttgcgcatttccgaagagatcaaaatctacgagaaattgcttaatcacagtgaattgactcacgccccatgcgcccctggcacgctcgaaacactgagtcgtttttccattcttagccgcctgaaagagccagaaaactccagcatttatagtaagatgcgggtttatgatggcgaaagtctgaaagacaccgatcccaaagccaagagctatcaggaatatcgtgactacgccggtgtcgatgaagggatgaacggtctgagcacgcgttttgcgtttaagatcctctcccgcgtgttcaacttcgatcatgtagaagtggcagcaaacccggtccatctgttctacgtcctggaacagcagattgagcgcgagcagttcccacaagagcaggcagaacgctatctggagttcctgaaaggttatctgatcccgaaatatgccgagtttatcggcaaagagatccagacggcctaccttgaatcctattccgaatatgggcaaaacattttcgaccgttatgttacctacgcggatttctggattcaggatcaggagtatcgcgatccggataccgggcagctgtttgaccgcgagtctcttaacgccgagctggagaaaatcgagaaaccggcggggatcagtaatccaaaagatttccgcaacgagattgttaacttcgtactgcgcgccagagcgaataacagcggacgcaatccgaactggaccagctatgaaaaactgcgcacggtcatcgagaagaaaatgttctccaataccgaggagctgttgccggttatcagctttaacgccaaaacgagtaccgacgagcagaagaaacacgacgactttgtcgaccgtatgatggaaaaaggctacacccgtaaacaggtgcgtttactgtgcgaatggtatttgcgcgtacgtaaaagctcttaacaaccctggcccggtacacatgttaccgggcctacaacgacagcgaaccgtgggcctgagaagcggcaacacaggcgtagcatacagttggcaaatgtagtacggggggcatatgacctggtttattgaccggcgtctgaacggcaaaaacaaaagcatggtgaatcgccagcgttttttacgccgttataaagcgcaaattaaacagagcatctccgaggccattaataagcgtagcgtgactgacgtcgacagcggcgaatccgtatccattcccacggaagatattagcgaaccgatgtttcatcaggggcgtggcggtctgcgccaccgcgtgcatccgggcaatgaccatttcgtccagaacgaccgaattgaacgtccccagggtggcggcggaggttccggcagtggtcagggccaggccagccaggatggtgaaggtcaggatgaatttgtctttcagattagcaaagatgagtatcttgatctgctctttgaagatttggccttaccgaatctgaaacaaaaccaacaacgccagctgaccgaatataaaacgcatcgggcgggttataccgctaacggcgttccggccaatatcagcgttgtgcgtagtttgcagaacagtctggcgcgacgcacagccatgacggcaggcaagcggcgggaacttcatgcactggaagagaatttggccatcatcagcaacagtgaacctgcgcaactgctggaagaggaacgtctgcgcaaagaaattgcagaattacgtgccaaaattgaacgcgtcccttttattgacaccttcgatttacgttacaagaactacgagaagcggcccgatccctccagccaggcagtgatgttttgcctgatggacgtttccggtagtatggatcaatccactaaagatatggctaagcgtttttatattctgctgtatctgttcctcagcagaacgtataagaacgtggaagtcgtatacatccgccatcatacccaggcgaaagaagtcgatgaacatgagtttttctacagccaggaaacaggcggcaccattgtttccagcgccctgaaactgatggatgaggtagtgaaagagcgttataacccggcacagtggaatatttacgctgcacaagcaagcgacggcgataactgggccgatgactctccgctttgccatgaaatcctggcgaaaaaattattacctgttgttcgttattacagctatatcgaaattacccgtcgtgcacatcagacattgtggcgagaatatgagcatctgcaatctactttcgacaactttgcgatgcagcacatccgcgaccaggatgatatttatccggtgttccgtgaactgtttcataaacaaaatgcaacagctaaaggctaaaactatcagccaggtcattatcgcctggctgatttttagcttactgtaaattatctcatttattacatacattagcttacaatcgctttaaatatgacagcataacctttacataatttagttccagaaaacaatcattcggaaaaatgattcagagtacacgtatttccatggggttattctttaaatattttttaagcttaacgaaaattgatcctggtcaaaactatatatctctgccaagtataaaatccagcactcacattgctctcctttttatggtttctatgggtacacaaaaattaaaagctcaaagcttttttattttcagtttattgctgacgttaattttattttgcattactaccttatataacgaaaacacaaatgtaaaactcatcccacagatgaattacctgatggttgttgtggctttgtttttccttaacgccgtcatttttcttttcatgttaatgaaatatttcactaacaaacaaattttaccaacactcattttaagccttgcatttttaagtggccttatctatttagttgaaaccattgtaattatccataaaccaattaacggcagtacactgatccagacaaagagcaatgatgtttctattttctatattttccgccaactcagttttatttgtttaaccagcctggcgctcttttgttatggaaaagacaacatccttgacaacaataagaaaaaaacgggaatcctgttgctggcgctgatcccttttttagtttttccccttctggcacacaatctgagcagttataacgctgactattctttgtatgtcgtcgattactgtccggacaaccatactgcgacctggggaatcaactatacaaaaatattggtttgtctgtgggcatttttactgttctttattatcatgcgcacacgattagccagcgaactatggccgttaatagcattattatgtctggcaagcctatgctgcaacttacttctactgactctggatgagtataattatactatctggtatatcagtcgcgggattgaagtttccagtaaactgtttgttgtgtcttttctgatttataacattttcaggagctgcaactctccagcaaactggcagttcatgatgtgctgaccaatatttataatcggcgctactttttcaacagcgtagagagtttattgagccgacctgttgttaaggacttctgtgtcatgctggttgatattaatcagttcaaacgcatcaatgcccaatggggacatcgtgtgggtgataaagtgctggttagtattgtcgatattatccagcaaagcatccgccccgatgatattttagcgcgactggagggtgaggtgtttggcttgctatttaccgaactcaatagtgcccaggcaaaaatcattgcggaacgtatgcgtaaaaatgtcgaactcctgaccggctttagtaacagatatgatgttcctgaacaaatgaccatcagtattggcacggtttttagtacgggtgacacgcgtaatatcagccttgtcatgacggaagcagataaagccttacgcgaagcgaaaagcgaggggggcaacaaagtgattattcatcatatttaagtgcaaaaatattcagagccatgctttttgcgtggcttttgcatacaatttattactattacccctaaatttcccctccccagcggcgcagagatgagtataattagcgcccctgtgccaggccgcaatcgaactttatctggttttctcgtttcactaaccgaaggagatgcgtataaagcttccgatgagcgtttatatgtcaataagcagaacaaaaacagccgttcatgataaccttctgtggttgtttgcttgtaatctcaggagcgtgaaatgactgaaatggctaaaggaagcgtgacgcatcagcggttaatcgctttattaagtcaagaaggtgctgacttccgcgtcgttacccatgaagcggtaggtaaatgtgaagcggtgagtgaaattcgtggcaccgctctaggccagggtgctaaggcactggtatgtaaagtcaaaggcaatggcgtaaatcaacatgttctggcgatcctcgcagccgatcaacaggccgatctgagccaactcgccagccatataggcggattacgcgctagcttggccagcccggcggaagtcgatgaactcacaggctgtgtcttcggcgcgatcccccctttcagcttccatccaaaactcaaactggttgccgaccctctactcttcgaacgatttgatgaaatcgccttcaatgcaggcatgctggataaatccgttattttgaaaaccgcggattatttgcgcattgcgcaaccagaactggtcaatttccgccgcactgcgtaattagccggtccgttcgataagaagaacggacaaaaccagtacaacagcaatggcaaaaaagctactcgtgataatcagtgtctcgacaaacatttgatcgttcatagcatgcccccgggagatagctgttttcacgttattgttagcgtgcacaaatggcagtttgatgacagttcgcctgattttttatgcaaaaaacgtaaagattttctacttccttcctgcagcaagcgtaaagtaagcaggcttattattttttggcaaggaaaccacgatgtttgatgtcactttgctgatcctgctcgggttagctgcgctgggctttatcagtcataacaccactgtcgccgttagtattctggtgttaatcattgtccgcgtcacaccgttaagcaccttttttccgtggattgaaaaacaggggctaagtatcgggataatcattctgacgattggcgttatggcccccatcgccagcgggacgctaccgcccagtaccttgattcacagctttctgaactggaaaagtctggtggcgattgcagtaggcgtgattgtctcctggctgggtgggcgcggcgtgacgttaatgggcagccagccgcaactggtcgccgggctgctggtaggcactgttttaggcgtagcgctgtttcgcggcgtaccggttgggccgcttattgccgcgggtctggttagcctgattgtggggaaacagtaattattgccgcgggtctggtttcgcactttgtggggaaacagtagttaatctcgcaatatatcggcctggcgtttgccccaggcctttcttaaacatagtaataaaggccgttgtactatcataccccagcgtatgagcaactttctgtacagtatcgcctttcactaatccctgaagcgccataatcagctgtaactgctgacgccactggcgaaaactcaaccccgtctcttttactatcagtcgggcaagattgcgttcactcatcgcaaaaaagccagcccattgccccaatgccccccactcgacaggccctttcgccatcatctccaccatcgtgcggattttaggatgagaagaaacgggcaggtgcagctgttgttgtggctgctgagggagttcatcaaacaggacctgaattaatctgcgggtcattggctcagcacgctgagtcgtcgtcctgtttgccagggttaaaattaattcccggcataaggggcttattttcaatgtgcaacatgttgtcggcattgtcactgcgctgggttcgataaacagaaaacagagttcagcattagctgttacttgattgctatgttccaccccgcccggtatccaaaccgcatattgtggcggcaccatccacaaagcattttccaccgtacaggtaattgcaccatgtagcgccagtatcagctgtcctttgcggtgctgatgtacaggactggttaactcatccgttccggcgtgaatacaaaatgcgaccgcggcttcatggtgtcggtcgggttcatagccattgagattcaacctgtgcatcattttgtccgaacttagcgataatttgtcattttagcttgattcaacataacaataaaaacggtaaggtacagcctcgtttgtaacaatgagaagcatatgacctgtagtactagtttaagcggcaaaaacaggattgtccttatcgctggcattctgatgattgccacaacattacgcgtcacctttaccggcgcagcaccgttactggatacgattcgttccgcttacagcctgacgacagcgcaaaccggcttattgaccaccctgccattattggcctttgcgctaatcagtcctttggctgccccggtagcgcgacgttttggtatggaacgtagcctgtttgccgcgttacttttgatctgtgctggtatcgcaattcgctctctccctagcccttacttattatttggcggtacagcggtcattggcggtgggattgcattaggcaatgtcttactgccaggattaattaaacgcgatttccctcattccgtcgccagacttaccggcgcatattccctgacaatgggagctgcagcggcactgggaagcgctatggtcgtgccgctggctttgaacggttttggctggcaaggcgcgttgctcatgctgatgtgttttcctctgctggctctttttttatggctgccacagtggcgaagtcaacaacatgcaaatttgagtaccagccgcgccttacatactcggggtatctggcgtagtccgcttgcctggcaggtcacattgtttcttgggatcaacagtctggtctattacgtgattattggctggcttccggcgatcctcatcagtcacggctatagcgaagcacaggcgggtagtctgcatggtttgctgcaactagccacagcagcacccggtttgctgatcccacttttcttacatcatgtgaaagatcagcgtggtattgcagcgttcgttgccttgatgtgcgcagtgggcgcggttgggctctgctttatgccagcgcacgcgatcacctggactctgcttttcggttttggttccggcgcaacaatgatactggggttgacgttcattggtctgcgggctagttctgcgcatcaggcggcggcactcagcgggatggcacaatccgtcgggtatttgttggcagcctgtgggccgccgctgatgggtaaaatacacgatgctaacggtaactggtctgtaccacttatgggtgttgccatacttagtctactgatggcgattttcggactttgcgccgggagagacaaagaaattcgctaatatccggtgctatagtgacgtaacaaatcatgcgtgaaagggagaacaaacacgatgaatattcagtgcaaacgcgtttatgatccggctgaacagagcgatggttatcgcatactggtcgaccgcctctggccgcgcggtatcaaaaaaaccgatttagcccttgatgagtgggataaagaaatcacgccgagtacggaactgcgcaaagcctttcacggcgaagtcgtcgattatgcaacctttcgcgagcaatatcttgcagaactggcgcaacacgagcaagaaggaaagcggctggcggacatcgccaaaaaacagccgctgaccctgctctacagtgcaaaaaacaccacgcagaaccatgcgctggtgctggccgactggctacgtagcttgtgattttagtacagcatccggcggttatttttcaccagccggatggtcacgccgccacaatgcccattcatcaatcgtttcaccgcccggtaatttgcaattgttgctgaccccttgcgctgtctgcactggaatgagcgtcccgcccttctgctggcaatagacgctcgccggatttgccataccaatctgcggcggtttaggtgcttctggctgagaaggggtactacaaccagccaggaccagcaagcaaggcagaacaaaactgataattttcatttattgatctcacatatttatccaagattagagtatcgcggtatcgttttgttttgcagcactatttttattacattcactcaaaacatattacgtcttgtttcatctttgttgatgatgttttatcatgcctgcaaagattaaataatcagcatttacccgccgtatcctggagttgttccgtgagtgatcagattatcgcccgcgtcagccaatcccttgccaaagaacagagtctggaaagtctggtccgacagcttctggagatgctggaaatggtcactgatatggaaagtacctacctgaccaaagtggatgtcgaagcgcgcctgcagcatattatgtttgcccgtaacagccagaaaatgtacatcccggagaattttaccgtcagctgggattacagcttatgcaaacgcgccattgatgaaaactgctttttcagcgatgaagtccccgaccgttggggtgactgtattgcggcacgcaatcttggcatcaccacatttctgagcacgccaattcacttaccggatggaagtttctatggcacgctttgcgccgccagcagtgagaagcgccagtggagtgaacgcgcggaacaggttttacagttattcgccggactgattgcacaatatattcaaaaagaggcactggttgaacagctgcgcgaagccaatgctgcgctgattgcgcaaagctataccgacagcttaaccgggctaccgaatcggcgggcgatttttgaaaatctgacgacactgttttccctcgcccggcatcttaaccataagataatgatcgcgtttatcgatctggataacttcaaattaatcaatgatcgttttggtcataatagtggcgatctgtttctcattcaggttggcgagcgccttaatacgctccagcaaaatggcgaagttattggtcgtctcggcggtgatgagtttttagttgttagtctaaacaacgagaatgcggatattagcagcctgcgagaacgcattcagcagcaaatacgtggagaatatcacttaggtgatgttgatttgtattatcccggtgccagtcttggcatagtagaagtcgatcctgaaacaaccgatgcagacagtgccctgcatgctgccgatattgcgatgtatcaggagaaaaaacacaaacagaaaacaccttttgtcgcgcatccagcgctacattcctgaggcgtattcacatccttttgattggtgataacatgcgaatcggtattatttttccggttgtaatcttcattacagcggtcgtatttttagcatggttttttattggcggctatgctgccccgggagcataaagatgaaaaaaacaacgattattatgatgggtgtggcgattattgtcgtactcggcactgagctgggatggtggtaacgtcacctctaaaaaatagcaaaggctgcctgtgtgcagcctttgtgcaatttaagcgttaacttttaatcttcctgtagataaatagcacgacaatcgcaccaataacggcaaccacgaagctgccaaaattgaagccatcgactttaccaaagccaaacagcgtgctgatccatccgccgactacggcaccgactatccccagcaggatagtcataaagaatccacctccatctttacctggcatgatccacttcgccagaataccggcaataagcccaaaaataatccaactcagaatgcccattgtttcctcacttatctgttttgcattagcgggttagtcgctgataaaaagcatagcacaacatcgggagggcaagatttgtgacgagcatcacggaggttttttttgcgatggcgcagaaattgcgccatcaacgatcagtgataattaccaaccacaaacatcatgttcgttttccgtgtcataagaacgtacggtattcaccagatcttttatcacttcagccgccacttctggcaccagcaaagtcatcggcgtctctgtttcataatcgacagaaacgccattgctgttattggtgacggtcacggtatacgttgctttgcccatgattcatttcccgttatgaatgactttccgttgttgcgcaccttccatcaggacttcaggagccacgaagaagtcaatgttgaaataagtatcgtcagtcatggcttcaatgttgtgccacttttctggagggaacaccgcaaactgccccgcttcgataaggatcacctgatcaggctctgcactgtgttcatcagcgtagccgagatatttgaccgccccatgcataacggaaaggcgtgggtaaacccccgggcgcgttcctttatcaagatgacgttcgaatattccggcaggtgcagtttgtttattccagaaaggcgtactgcgcgtatgaatataattctgtgggatttgaagcatccttttccctccttcggtgaatgcgctgaaaacggtttattccagccgtttcagggtacgcctgataatttgcattttaaataccatttattggttactttttagcaccatatcagcgaagaatcagggaggattatagatgggaagcccgcgacaacgcgggctgaaagcatcaggattgcagcgtcgccagtcgggcagcgaaacccacgaacatcaaaccaatcagactgttgccaactttagccagtttctttttggtacgtatgtactgcgtgacaaaagcaccagatataatcaggaagctcaaatagcagaaactcaccagttccagcgtcgccgccagaataaagaaactaattcccgtatgtggggcattaacatcgataaactgtacgaaaaagctcacatagaacaaaatggctttcggattagtcaggctcaaaattaacgcgcgtttaaaaatagcaccgtattggggctcatcggatttggcctcgctatttttacccttcagggtcgcgtaaagaattttactccccagatagagcaaataaaacgcaccaagataacgtacaatgttgaataatatcggggtggtcttaattaatgtcgccactccagcccatgccagaaacatcaataccgcatcgccaataaatacaccgcaggccgcaagataaccgcctttcataccgctactgacgctatttttgagtacaaacagggtatttggccctggcaccaacacaataaaaatggccccaaccagataggtccagtaattcagaaccccgtattcagcgaacacattaacctctttaattatctttcgatcatgcgcgattaaaggtgaatatgctaaccaatctgtagcggcttagaaaggagaaaatcaggttttaacctgatatcaacccgataattgaatcattaatcaggcatgctccagactaaaattcgggtagtgctcggcaaaatactggcgtaaaaattctaccgttatccgcactttcgcactcgtcgccagcctactaacataaacggcccagacgttcgctggctggtaatattccggtagcacttgcactaaatgaccactggcaatgttttcgctaacatcccaccaggaacgcagagcaatcccctgcccatcgagacaccactgatggacaatttctccatgattagagctcagtgggccggtgactttaatcgcatgggggccttctttattgcgtaattgccagacaccaaaaggatgatcgcgctctttaatgaccaggcacggcaatgcagaaagatcggttaaatgtttcggcgcgccatgttgcgcaataaattccgggctcgcgcagagaatacggtaattggtcgccagtttgcgggcgattaaattaggggcgatgtcatcgccaatgcgaatatcgagatcgacaccttcattgaccaaatcgaccagtcggtcttccacatcaaaacgtaattccagttgcggatacgccttcgccagcgctaataacgccggagccaccacctgtcgtccaaaaccaaagctgctgataatacgcagcatcccctgcggcacctgacgcacgtcagaaagttcgtccatcatctgaccgacatcctgcaaaatccgctgcgcccattcataaatccgctctccttcttcggtaatggtgacgcggcgggtggtgcggtgtaacaacaccacgtttagcgtttgctccagcaaggcgatgcgcttgctgacgaacgccggactaacgcccagttcttccgccacggcggcaaaaccagcccggcgagccaccagcataaagacgcgcaaatcattcagcagcggtaaattattcatgattcgtgttttatgtttcaccagttacggggattaattccttttcagtcaattataggatggtgatgttgtcaattttgatggtcaggaagtgagaacccaatgatgaaaacgatgcgtattgctgcgatcccgggagacgggattggcaaagaagtccttcctgaagggattcgcgtgttacaggctgccgctgagcgctggggcttcgccttgagttttgagcaaatggagtgggcgagctgcgagtattacagccatcacggtaaaatgatgccggacgactggcatgagcaacttagccgtttcgacgccatctattttggtgccgtcggctggccggataccgttccggaccatattagcttgtggggtagcctgctgaaatttcgtcgtgaattcgaccagtacgtcaacctgcgcccggttcgtctctttcctggcgttccctgcccgctggcgggaaaacagcctggcgacatcgatttttacgtggtcagggaaaacaccgaaggcgaatattccagcctcggcggtagagtgaatgaaggtacagagcatgaagtcgtcattcaggaaagcgtatttacccgccgtggtgtcgatcgcattttgcgttatgccttcgaacttgcgcaaagccgtccacgtaagacactaacttctgccactaaaagcaacggtttagccatcagcatgccgtactgggatgagcgagtggaagcaatggccgagaattacccggagatccgctgggacaagcagcatattgatattctctgcgcgcgttttgtgatgcagccggaacgattcgatgtggtggtggcgtccaatttgtttggcgatatcctttccgatcttggcccggcctgcaccggcaccattggcattgccccatccgccaacctgaatccggaacgcactttcccgagcctcttcgagcctgtccacggttccgcgccggatatctacgggaaaaatattgctaaccctatcgccacgatttgggccggggcaatgatgctcgattttctcggcaatggcgatgagcgtttccagcaagcgcataacggtattctggcagcaattgaagaagtgattgctcacgggccgaaaacacctgatatgaaaggcaatgccaccacgccacaggttgccgacgcgatttgcaaaattattttgcgttaaggtcaaaccagtttatttgaaccgcgtcactgacgcggtttttttattcgttctttgcagtaaataacctgcgtcatttcaccttttattgtttccgtttcgtgttttatggctttccgtattcttaattgtttaatttatgtaacatgcaaattttgttacgcgtacgttaggttccgccgtacaggtattggttttgctggcaatgggactggtgatttatttagccaccagtaaatacggcaatattcgtcttggcgaaggaaaaccggaatacagcacgctctcctggctgtttatgtttatttgtgccggtttaggttcttctacgctttattggggggttgctgaatgggcctattattatcaaacacctggattaaatatcgcaccgcgtagtcaacaggcactcgaatttagcgttccctactctttcttccactggggcatcagcgcctgggcaacttatacgctggccagtttaatcatggcttatcactttcatgtgcggaaaaacaaaggtctgagcctttccggcattattgctgctattaccggcgttcgcccgcaaggcccatggggaaaactggtcgatttgatgttcctgatcgccactgtcggcgcactgaccatttcccttgttgttaccgcagcaacctttacccgtgggctttccgcgctgaccggtttacccgataacttcaccgtgcaggcatttgtgatcctgctttccggcggcattttttgcctaagcagctggattggtatcaacaacggtttgcaacgtctgagcaaaatggttggctggggcgcgttcctgctgccattactggtgctgattgtcggcccaaccgaatttattaccaacagcatcatcaatgccatcggcctgaccacgcaaaacttcctgcaaatgagcttattcaccgatccgcttggcgatggtagttttacccgcaactggaccgttttctactggctgtggtggatcagttacacccctggcgtagcaatgtttgtcacccgcgtttcccgcggtcgtaagattaaagaagttatctggggactgatcctcggcagcaccgtcggttgctggttcttctttggcgtaatggaaagctatgccattcatcagtttatcaatggcgtaatcaacgtcccacaggtgctggaaacactgggcggcgaaacagctgtacagcaagttctgatgagcttgccagccggtaaattgttcctcgccgcatacctgggcgtgatgattattttccttgccagccatatggatgcagtggcctacaccatggcggcgaccagtacgcgtaatctccaggaaggtgacgatcctgaccgtgggctgcgtcttttctggtgcgtggtgatcactctgatcccgctttccatcttgtttaccggtgctagcctggaaacgatgaaaaccaccgtcgtgctcacagcccttcccttcctcgtcattttactggtgaaagtcggcgggtttattcgctggctgaaacaggattacgccgacattccggctcatcaagttgaacattatctcccgcagacaccggttgaagccctggaaaaaacgccagtgctccctgcgggaaccgtattcaaaggcgacaactgagcgccatcatcctaacgataaaggtatccctatgagcaatctgagccctgactttgtactacccgaaaatttttgcgctaacccgcaagaggcgtggaccattcctgcccgtttttataccgatcagaacgcgtttgaacacgaaaaagagaacgtcttcgccaaaagctggatttgcgtcgctcacagcagcgaactggcgaatgccaatgattatgtgacgcgtgagatcattggcgaaagcatcgtgctggtacgcggtcgtgataaggttttgcgcgcgttctataacgtgtgtccgcaccgtggtcatcagttgttgagcggtgaaggaaaagcaaaaaatgtgattacctgcccgtatcacgcatgggcattcaaactcgatggcaacctggcccatgcacgtaactgcgaaaacgtcgccaatttcgatagcgacaaagcgcaactggttccggtgcgtctggaagaatatgccggattcgtcttcatcaacatggaccccaacgccaccagcgtagaagatcaattacccggcctgggcgcgaaagtgctggaagcctgcccggaagtccacgatctgaaactggcggcccgctttaccacccgcacgcctgccaactggaagaacattgtcgataactatctcgagtgctatcactgtggtccggcgcatccaggtttctccgactccgtacaggttgatcgttactggcacaccatgcacggtaactggacgctgcaatacggtttcgccaaaccgtccgaacagagctttaaatttgaagagggtacggatgcggcattccacggtttctggctgtggccgtgcacgatgctgaacgtcaccccgatcaaagggatgatgacggtcatttatgaattcccggtggattctgaaactaccctgcaaaactacgatatttacttcaccaatgaagagttaaccgacgagcaaaaaagcctgattgagtggtatcgcgatgtgttccgtccggaagatttacgtctggttgaaagcgtacagaaagggctgaaaagccgtggctatcgtggtcaggggcgcatcatggccgacagtagcggtagtggcatttccgaacatggtatcgcccatttccataatctgctggcgcaggtgtttaaggactaatgacatcggcggcggtattttccgccgctgggctgatttttgatggagtacagcaatgagtgactatcaaatgtttgaagtacaggtgagccaggttgaaccccttaccgaacaggtgaaacgcttcacgctggtggcaaccgatggcaaaccattacctgcgtttaccggaggaagtcacgtcattgtgcagatgagcgatggtgataaccagtacagcaatgcgtatagtctactgagtagcccgcatgacacctcttgttatcagattgccgttcggctggaggaaaacagccgcggcggttcccgctttttgcatcagcaggtaaaagtgggcgatcggttaacgattagtacgcctaataacctgtttgcgctaattcccagtgccagaaagcatctgtttatcgcgggcggtattggtatcacccctttcctgagccacatggcagagctgcaacacagcgacgtcgactggcagctacattactgcagccgaaatccagaaagttgcgcatttcgtgatgagctagtccagcatccgcaggctgagaaagtccatttgcatcatagtagtaccggaacacgactggaattagcgcgattattggcggatatcgaacctggcacacacgtttatacctgtggccccgaggcgctaattgaagcggtaagaagtgaagctgcgcgtctggacatcgccgccgatacgctgcactttgagcaatttgctatcgaagacaaaaccggcgatgcatttaccctggtgcttgcccgttccggaaaagagtttgtggtgccggaagagatgactattttgcaggttattgaaaataataaagccgcgaaagtggaatgtttatgtcgtgaaggggtatgcggaacctgcgaaacagcaatactggaaggtgaagctgaccatcgggatcaatattttagcgatgaagagcgtgccagccagcaaagtatgttgatctgttgtagccgtgcgaagggtaaacgcctggtgttggatttgtaatttgccgaagccggatgtggcgctgagcgcgcccagtccggcttcggaagattttactgcggatattcctgcaataaattgtgtaatgcttccgccatcagctcaccacgccagccggaaatcagctccggcaaattgttctgcggtttcagtttccagtgccagttcagcagttggttgatttgccgacggcttgccagcaattcggcgctgatcttatgcgtttcgctcacgtcagtaatcaggctcttaatcgctttaaacgctttacgataacccggcatgtccatcaggttaagcatcggctgcggtaaggcatcttccggcaatgtctgcgctttttccaccagcgctagcagcgttttaccgtgaaagcggatttcgctaccggataaacccaggctgtccagttcgcctaaacttcccggcatataacgcgctacgctccacaaatgctcttcacgcacgacaaagttcaccgccagatcgcgctctcgcgccttgcgcagtcgccagtcggctaacagttgcagacaggccagttggcgtgtgcgtaattgccaggcattggtgatatcacgccaggcatcttccggcgcaacgacttcctgacgacgcatttgcatcaggcggcattcatccagcgccgcaggtagccagccggaggcctccgtttctaccataagcttggcggtgatcggtaacagataccagacatccgccgctgcgtattcacactgacgttcggtcagcggtctggccagccagtcggtgcggctttcactcttgtccagcgtaacgccggaatactcttccaccatggaagcgaaaccccaactcatcgggcgtccgcagaaggcagcaaggatttgcgtgtcaatcaagggttgtggtaattcgccaaagacattgaggaacacttccagatcttcactgcctgcatggagaaattttgtgatggacggatcgcgcaggatcgctttcagcggactccagtcggtgatcccgagtggatcgattagcgccagatgctcgccatcgaaaagttgaatcaaccccagctgcgggtaataagtgcgcgtacgaacaaattcagtatccagggctatcgccggaaaggcacggacggcttcacacaaagaagccagcgcatcgtccgtggtaatcatttggtaattcaaattgttttctctttagtgggcgtcaaaaaaaacgccggattaaccggcgtctgacgactgacttaacgctcaggctttattgtccactttgccgcgcgcttcgtcacgtaattctcgtcgcaaaatttttccgacgttagatttcggtaactcatcacgaaactccaccagcttcggtactttgtatcccgtgagctgacggcggcaaaaagtcaccagactctcttcggtaaggcttggatcttttttcactacgaagattttcaccgcttcaccactggagccggaaggtacgccaacagccgcgacttcctgtacgccaggatgctgcatgacgacatcttcaatctcgttgggatagacgttaaaaccggaaaccagaatcatgtcttttttacgatcgacaatgcgcaggaatccttcttcatccattaccgcgatgtcgccggtgtgtaaccagccatttttgatgatttcatcggtagcatcgggacgctgccagtaacccagcatcacctgcggtcctttgacacaaagctcacccggttgacctggtggtacttcattatcatcatcatccaccagtttggcttccgtgctcggcaccggcaaaccgatgctaccactatgataatcaatatcatatgggttaacgctgaccagcggcgcacactcggtaaggccatagccttccagcagatactgtccggtcagtttcacccaacgctctgccaccacttgctgcactggcatcccaccgcctgcggaaagatgcagactggagaaatccagctgctggaactctttattgttcagcaacgcattgaacaaggtgttaacgcccgtgatagcggtaaacggatatttcgctaactcttttaccaaccctggaatatcgcgcgggttagtgataagcaggttctgcccacccagttcgataaacagcaggcagttaatggtcagggcaaaaatgtgatacagcggcagcgccgtcaccaccagctctttgcccggatgcaacagcggaccataggtcgcgttaacctgttccaggttcgccagcatattgcggtgagtcagcatcgcgcctttcgccacaccagtggtgccgccggtgtattgcagaaaagctaaatcttccggcaccagttcgggtttgacgtactgcatccggtagccgttatgcagtgcgctacgaaaactaatggcatctggcagatggtatttcggcaccaaacgcttgatgtatttaacaacgaaattgactaccgtgccttttgccgtagatagctgatcgcccatacgggtcagaattacgtgctgaacggcggttttatcaaccactttttccagtgtgtgagcaaagttagacacgataacaatcgcgcttgcgccgctatcgttaagctgatgctcaagctcacgcggggtatacaacgggttaacgtttacgacgatcatcccggcacgcaaaatgccaaacagcgccaccggatattgcaataaattaggcatcatcaacgcaacgcgatcgcctttcttcagccccaacccttgttgcaaataagcggcaaacgcgcgactgcgttcttccagcttgcggaaggtcattacctcccccatattcacaaacgcaggttgatcggcgtagcgcgcgacgctctgctcaaacatatctaccagagattgataacggtcagggttgatctccgtcggaacgtccgcgggataacggttaagccaaaccttcttcaattcttcacctctaaaatgcgtgttcgtcgtcatcgcaaccccaaatgatatacatgccgttaacataatattaactcatcataccagcttgataattacccaacgaaaaggttgcgaagcgcgtcactatttatttttatctttaccgtaagaatgcagaaacagcggaccagccgctgtttctttttctttaaaaacaagcaattattcagttacaactgtttgtactctcgcggggccgggattataccagccccatccgccgtagccatagggccagccacgaccgccataaaaccatggatcaatcggctgaggcggcataatcacctgctgggttaaatgccaacgtttgtaacccgttacttgcatcaccataaatttatagggcgtattgccgattttgccgtcaaccgcaccagtgattggcccgactaccgtaaccagttgtccacggaaatccaccgggtccagaaaaccgttcacatcggcataaatgcgaccgcgagaaggttctcccagcgtcggtctggctccgctgtccagcggtacggtagcaatttccaggcgagttttcccttgctggttttgtaccgcaaccactttgccaccaaagcgtgcctcctgaccaacgtacagctgcggcgcactcatcacccgaactaaatcttgttgcggcgtgggactgctgcctttaatggcgtccggcacagtgacacaaccgctcagcattagcgcaaacgtacctgccagtatgcctttgataacattcttttgaaccgccatggtgcgactcctttttttctcagggcatactcttaagattcattctttgcccggaagtttcttccatgcgacgttgttacgtaaataaaccggttcggcatgttccaccgccaccgttttaccctcagcaaacatctgacacgcaatcggcagcatatcttcagcagcaggcagtaacacttcgccatcgcgcaaaaccagcccgctctctttaccgagatccggccaagcttgccagcccgtccctaccgtcacccattcgccggaaagctgttgcattcgttcatggacgatttcgggtttgagtacggcttcggtttcttcaccgtgccagataccgttttcatcacgctgatattcggcccagtaaacttcgcccattcgcgcgtcaatggctgccagcacgcgggttgcgccgtttttgcgccacgccccttgcgccatcgtcattagcgtggagacgccaatcatcggtaattccgcgccaagcgccagcccttgcgcgatgccaataccaatgcgcacgccagtaaagctaccggggccgcgcccgtaagccagagcgttaatatcagtcagggaagttccgctggtggtcaggatatcctgcaccatcggtaagattcgttgagtatgttcacgagggcaaagctcaaaatgagcgttgacagtaccgtcgttccacagggcgacagagcaggcctctgtcgcggtatcgatagccagaattcgcatgggtcttcgtgcttagatcaataaaaaggcgcgcatcataccatactccgtaacaaattacctggaggatggtatcgcaaggaaacgaaccgcacgggcaatgtcacgggtgcgtggcgcgggcggcagactggcgagaaacgtcgcgccgtaaggacgcatcaccagccgattgtcacaaatcaccagcacgccacgatcgtcggcgtcgcgaatcagtcgccctaccccctgtttgagagtaatgacggcatctggtagttgcacttcatcgaacgggtcgccaccgcgcaaacgacaatcttccatgcgcgcttttaacagtggatcatccgggctggtaaacggcaatttgtcgataattaccaaactcaatgtatcgccacgcacgtccaccccttcccagaaactgctggttgccacaagaagcgcattaccggcgctgacaaattgctgcaacagttgccctttgctggtttccccctgcaacaatacaggaagcgtcatggtagcgcggaactgctcggccagatcgcgcatcatggcgtggctggtacaaagcataaaacaacgaccgttgttagcttcgatgatcggtcgcagcattgccgctaactggcgagcagaacctggctggttggtttgcggcagattgcgcagcacacagagtaacgcctggcggctgtaatcaaatgggctgggcaacagcaagctctcggcctgttcgatgccaagccggctggtgaaatgatgcagatcgtcgttcacgctcagcgttgcactggtgaagatccagctaccgggtttttgcgccattaactctttgaatttatccgccacgctgagcggcgtgagagccagagtaaaatggcggctagtgcattcgtaccagtagctgtagcccggctgattgatctcttttagccgcttcagccgtgtgcgatacaacgtggcgcgctcaaatgccgcatccagcaaggcggaacgccccagactcagtttcgccacgtcataacaaagttccagggtgtcatcgagcagtaaaaatgcccgctgaatttgcggattagctaacagctcacgcaggttaccgcgataacctggctcaccgagttgcagacgaaaatcctgcgcactctgggcaagacgatcagcgcacttttgtaactgctgggtgtcttttaattcggtgcggtaggcgatggtgatgtcttttgccaggtcgagcagttgtcgactggagagactctgaccaaaatactggctggcaatgtccggtagctggtgggcttcgtcgaagatcatgacgtccgcttccgggatcagttcgccaaatccactctctttaaccaccatatccgccagaaagagatgatggtttaccaccaccacatcggcgtccatcgcttttttacgtgctttgaccacaaagcaatctttatacatcgggcagtcgctgccaagacagttgtcgttggtgctggtgaccagcggccacgcctgactatcttccgccacgctgacgcaggtgctgatatcaccatcgactgtttgattagaccaggagcgcagcaggatcacatcgcttaagatttgtaccggcagatcgccccccgccagcgcctgctgttcgagacgttcgaggcagaggtagttactgcgccctttcagcagcgccacgttgcccgtatatttcaatgccttactgactgttggcaaatcgcggctgtagagctgatcctgcaacgctttactgccggtgctgataatgactttctttttcgcccgcagcgcaggagccaggtaagcgtaggttttgcccgtaccggttcctgcttccaccaccagcggctggcctttttctatcgcctgggtgacggctaccgccatctgtcgctgtggttctcgcggcttaaagcctggtatcgctttcgccagctgaccgtctggtgcaaaatcgtccgtcacactaccccctgttgatttgaacagggattatgtcaggatgagggcgctttcgccagttgaagtggtgacggcgacctcacattgtggcagtctttgcagcacgaaaatggaagtataatgaggacaaaatgatgactatcgttcgtatcgatgctgaagcccgctggtctgatgtagtaatccacaacaacacgctctactacactggtgtaccggaaaacctcgacgccgatgcctttgagcaaaccgccaacacgctggcacagattgacgccgtgctggaaaaacagggcagcaataaaagcagcattctggatgccaccattttcctggccgataaaaacgacttcgcggcgatgaataaagcgtgggatgcttgggttgtcgcgggtcatgcgccggtgcgctgcacggtacaagcgggtttgatgaacccgaagtataaagttgaaattaagattgtggctgcggtgtaagctttatcgaagcaaaataagtcagacgataatttatcgataatactggtcggttttacataaatcgaccagagaataagatattactgttgatgcttctgctaattcattatttatatttataatttcaattttatctataaaactaactatataaataaacataaacatgccgttgtgttcgccctttgattagcaactctggttttctttcttagctgaacaatctggttatagcgtgcggactgaccgttaaatttctccatcttactggataacacaccatgagctgctacctttaaaacacctgaatgtcaacaggttaactcgtgccatatcgttataatccctttgatattagatgcaaattaaggtcatatatagccttatcgataacatggttaattttaaggataagaatatgcctgctgtaatagataaagccctggatttcattggtgccatggatgtaagtgcgccaacaccaagtagcatgaatgaaagcacggcgaagggaatctttaaatatttaaaagaactgggagtacccgcgagtgccgctgatattacggcgcgagctgaccaggaaggctggaaccctgggttcacggaaaaaatggttggatgggcaaaaaaaatggagacaggtgaacgttctgtgattaaaaatcctgaatactttagtacatatatgcaggaagaactaaaagcactggtctgagttaaatttatatcagcataaatgggtcaggacgcttttaatcacatataaaaagcgtcctttttctcacaatcaaatgatcatcggcttctataacgaaatcgatacggattagtgtgttactcgtcttcatcctcaaaacgcgccacgattcgctcgccggagtggttggcacgcagctcttctgccaccagcgcgattgcctggccgctgctcatcccttgtgccatcagttcctggatccgctcgacagctttttgctgctgttcatgggtgagactaggtaaacctgcaaacattgttaactcctgctaaattgttggcgctaattatttcatgctacccggcacatagccagtagagtcaggactgatgaagacgttatctcccgctgtgattactttactctggcgtcaggacgccgctgaattttatttctcccgcttaagccacctgccgtgggcgatgcttttacactccggctatgccgatcatccgtatagccgctttgatattgtggtcgccgagccgatttgcactttaaccactttcggtaaagaaaccgttgttagtgaaagcgaaaaacgcacaacgaccactgatgacccgctacaggtgctccagcaggtgctggatcgcgcagacattcgcccaacgcataacgaagatttgccatttcagggcggcgcactggggttgtttggctacgatctgggccgccgttttgagagtctgccagaaattgcggaacaagatatcgttctgccggatatggcagtgggtatctacgattgggcgctcattgtcgaccaccagcgtcatacagtttctttgctgagtcataatgatgtcaatgcccgtcgggcctggctggaaagccagcaattcagcccgcaggaagatttcacgctcacttccgactggcaatccaatatgacccgcgagcagtacggcgaaaaatttcgccaggtacaggaatatctgcacagcggtgattgctatcaggtgaatctcgcccaacgttttcatgcgacctattctggcgatgaatggcaggcattccttcagcttaatcaggccaaccgcgcgccatttagcgcttttttacgtcttgaacagggtgcaattttaagccttagcccagagcggtttattctttgtgataatagtgaaatccagacccgcccgattaaaggcacgctaccacgcctgcccgatcctcaggaagatagcaaacaagcagtaaaactggcgaacagtgcgaaagatcgtgccgaaaatctgatgattgtcgatttaatgcgtaatgatatcggtcgtgttgccgtagcaggtagcgtaaaagtaccagagctgttcgtggtggaacccttccctgccgtgcatcatctggtcagcaccataacggcgcaactaccagaacagttacacgccagcgatctgctgcgcgcagcttttcctggtggcagtataaccggggctccgaaagtacgggctatggaaattatcgacgaactggaaccgcagcgacgcaatgcctggtgcggcagcattggctatttgagcttttgcggcaacatggataccagtattactatccgcacgctgactgccattaacggacaaattttctgctctgcgggcggtggaattgtcgccgatagccaggaagaagcggaatatcaggaaacttttgataaagttaatcgtatcctgaagcaactggagaagtaagacgtggaataccgtagcctgacgcttgatgattttttaagccgctttcaacttttgcgcccgcaaattaaccgggaaaccctaaatcatcgtcaggctgctgtgttaatccccatcgtccgtcgaccgcaaccggggttgttgctgactcagcgtagcattcatctgcgtaaacacgctggacaagtggcattccctggaggtgcagtcgatgacacggacgcaagtgctatcgccgccgcgctgcgcgaagctgaagaagaggtcgctataccgccttccgccgttgaagttatcggcgtgctgccgcccgtcgatagcgtcactggctaccaggtaaccccagtggtcggcattatcccgcccgatctgccgtatcgcgccagtgaagatgaagtcagcgcggtgtttgaaatgccgctcgcccaggcattacatctgggtcgttatcaccctttagatatctaccgccgtggtgatagtcatcgggtatggctgtcctggtacgaacagtattttgtatggggaatgaccgcaggcataattcgtgagctggcgctgcaaattggtgtgaaaccctgactatacttatctttacatctacaaaacactacttgagacaatcatcgcaatattagttaaatcgcggtttttgattagtttaattcatgtgaatagttaagccagtcgccgcgttccctcttacactatgcgctgttattagttcgttactggaagtccagtcaccttgtcaggagtattatcgtgattagtctattcgacatgtttaaggtggggattggtcccagttcttcccataccgtagggcctatgaaggcaggtaaacagttcgtcgatgatctggtcgaaaaaggcttactggatagcgttactcgcgttgccgtggacgtttatggtagtctgagcctgacgggtaaaggccaccacaccgatatcgccattattatgggtcttgcaggtaacgaacctgccaccgtggatatcgacagtattcccggttttattcgcgacgtagaagagcgcgaacgtctgctgctggcacagggacggcatgaagtggatttcccgcgcgacaacgggatgcgttttcataacggcaacctgccgctgcatgaaaacggtatgcaaatccacgcctataacggcgatgaagtcgtctacagcaaaacttattattccatcggcggcggttttatcgtcgatgaagaacactttggtcaggatgctgccaacgaagtaagcgtgccgtatccgttcaaatctgccaccgaactgctcgcgtactgtaatgaaaccggctatagcctgtctggtctcgctatgcagaacgaactggcgctgcacagcaagaaagagatcgacgagtatttcgcgcatgtctggcaaaccatgcaggcatgtatcgatcgcgggatgaacaccgaaggtgtactgccaggcccgctgcgcgtgccacgtcgtgcgtctgccctgcgccggatgctggtttccagcgataaactgtctaacgatccgatgaatgtcattgactgggtaaacatgtttgcgctggcagttaacgaagaaaacgccgccggtggtcgtgtggtaactgcgccaaccaacggtgcctgcggtatcgttccggcagtgctggcttactatgaccactttattgaaagcgtcagcccggacatctatacccgttactttatggcagcgggcgcgattggtgcattgtataaaatgaacgcctctatttccggtgcggaagttggttgccagggcgaagtgggtgttgcctgtagtatggctgctgcgggtcttgcagaactgctgggcggtagcccggaacaggtttgcgtggcggcggaaattggcatggaacacaaccttggtttaacctgcgacccggttgcagggcaggttcaggtgccgtgcattgagcgtaatgccattgcctctgtgaaggcgattaacgccgcgcggatggctctgcgccgcaccagtgcaccgcgcgtcagcctggataaggtcatcgaaacgatgtacgaaaccggtaaggatatgaacgccaaataccgcgaaaccagtcgcggtggtctggcaatcaaagtccagtgtgactaatacttcttactcgcccatctgcaacggatgggcgaatttatacccgctttctcgtctgctgtaatattccccactacacttccactgttgcgtcaggcgtttgtcgccatacgcttacagggtggcccgcatgcaaaaagcacaacggatcattaaaacctatcgtcgtaatcgaatgattgtttgtacgatttgcgcactcgttacgctcgctagcaccctgagcgtgcgatttattagtcagcgtaacttaaatcaacaacgggtagtacaattcgccaatcacgctgtagaggaattagataaagtactgcttcccctacaggcaggtagcgaagtcttgcttccgctgattggtctgccctgctctgtcgcccatttgccattacgtaaacaggcggcaaaactccaaactgtgcgatccattggcctggtgcaagacggcacactttattgctccagcatttttggttatcgcaatgtgcccgtcgtggacattctggctgaacttcctgcaccgcaaccacttttacgcctgacgatcgaccgtgccctgattaaaggcagtccggttttgattcaatggacgcctgcagcgggcagtagcaatgctggggtcatggagatgattaacatcgacttactgacggcaatgctgcttgagccacaactgccgcaaatcagtagcgccagcctgacggtggacaaacggcatttgctctatggtaatgggctggtagattcccttccgcaacctgaagacaatgaaaactatcaggtttctagccaacgctttccttttaccattaacgttaatggtccgggggctacggcgctggcatggcactatcttccaacacaattaccgctggcggtgctgctaagtttactggtgggctacatcgcctggctggcgaccgcttaccgaatgagcttttcccgcgaaatcaatctgggcctggcgcaacatgagttcgaattgttctgtcagcctttgcttaatgcgcgcagccagcaatgtattggtgtagagattttgctgcgctggaacaatccgcgtcagggctggattagtccggatgtgtttattcctatcgcggaagaacatcatttaattgtgccactgacccgctatgtgatggcagaaaccattcgtcagcgccatgttttcccgatgagtagtcagtttcatgttggcattaacgtcgcacccagccattttcgccgtggtgtgctgataaaagatctcaatcagtactggtttagcgctcacccgattcagcaactgatcctcgaaatcaccgaacgcgatgccttactggatgttgattatcggattgcccgcgagctgcatcgtaaaaacgtcaaactggcgattgatgacttcggcaccggcaacagcagcttttcctggcttgaaacattacgtcctgacgtgctgaaaattgataagagttttaccgcagctataggttctgacgcggttaacagcacggtgaccgatatcatcatcgcgctggggcaaagactgaatattgaactggtggcggagggcgtggaaacgcaagaacaggcgaagtatttgcgccgtcatggcgtgcatattttgcaagggtatttgtacgcacagccgatgccgctacgtgattttcccaaatggctggcgggcagccaaccgccgcccgcccggcataatggacatatcacgcccattatgccgttacgttaacgcttactcatcttcatcgtgcgccggttgctctttaacaatgcgaaccagatcaacacgataatcattggcttcaatgatggtgatatgcagtggccctacatcaatcacatcgcccacacggggaatgtgaccatttgcgctgatcacgaggcccgcgaccgtcgcgatatcatcgtcatcggcaaggtgctcaacatcaagcgcctgctgcaaggcatgcaaatctgtaccgccttttaccagccagccgtcaccatcagtaatgatttccggcgtttcgtcagcgtccgggaattcacccgcaatggcttccagcacatccagcggcgtgaccagaccttgtaccacaccaaactcgttggtcacgataacaaagctcccgcgagcacgacgcagcacgcccaacaggttgatcggatcgagggtttccgggacgataatcgccggagacgcgctagcaatcgccgccacatcaacgccctcttccagcgccaccagcagttctttagcacgtacaataccgatgatttcatccagttcaccgcgacataccgggaacagactgtgcggactagagagcagttgctcgcggatttcatcgaccccgagattagcgtcaacccagcttatttcaccgcgcggcgtcatgatcccgcgcagagaacggctcgccagcgtcagtacgccgttaatcatgtaacgttcttcttcggcaaatgcaccttccgggatcggcatcggcatcgggttatcggcatcgtgctgaacattggcctgacgtttcccgcccatcaaacgcaggatggcatcggcagtacgcgctcgcagcggcaaagtgctctggtggcgaataaagttgcgacgcgcaatctggttaaacacttcgatgatgatgctgaagccaatcgcggcatacaggtagcctttcggaatgtggaaaccgaaaccttctgccaccagactcagaccaatcattaacaggaagctcagacagagcaccaccaccgtggggtgctggttaacgaatcgcgtcagcggtttggatgccagcaacataaccgccatcgcaatcactaccgccgccatcatcaccggcagatggttaaccatccctactgcagtaattaccgcatccaagctgaagacggcgtcaaggatgacaatctgtgtgacgaccacccagaaactggcgtagcctttaccgtggccggaatcatgatcgcggttttccagccgttcatgcagttcggttgttgctttgaacagcaagaatatccccccgaacaacataatcaggtcgcgtccggagaaggagaaatccatgacggtaaatagcggtttggtcagcgtgaccatccaactaatcaggctcagcagccccagacgcataatcagcgccagacttaaccccagcaaacgcgctttatcgcgttgttttggcggcagtttgtcagcaagaatggcgatgaagaccaggttatcgatacccagcacaatttcgagaacaacaagcgtgagtagccccgcccaaatactggggtccattaagaattccatgacaagctcctgcttaaggaatagctattcgacgccagaaataatgcaggcgtaacgacaaaatgcaaacgaaaggtgcggcatagagtgccagaaaggcaggcgttaaaaggcctgatgctgaaatgacgtcggtgacgatccatactgcgggctactgccctatactccatggttgttaaacgggagttaaacatatcagagacgcctctgatttggcaaagatttaccttcctttgcaaacgaatgtgacaaggatattttacctttcgaaatttctgctaatcgaaagttaaattacggatcttcatcacataaaataattttttcgatatctaaaataaatcgcgaaacgcaggggtttttggttgtagcccttatctgaatcgattcgattgtggacgacgattcaaaaatacatctggcacgttgaggtgttaacgataataaaggaggtagcaagtgaccattgctattgttataggcacacatggttgggctgcagagcagttgcttaaaacggcagaaatgctgttaggcgagcaggaaaacgtcggctggatcgatttcgttccaggtgaaaatgccgaaacgctgattgaaaagtacaacgctcagttggcaaaactcgacaccactaaaggcgtgctgtttctcgttgatacatggggaggcagcccgttcaatgctgccagccgcattgtcgtcgacaaagagcattatgaagtcattgcaggcgttaacattccaatgctcgtggaaacgttaatggcccgtgatgatgacccaagctttgatgaactggtggcactggcagtagaaacaggccgtgaaggcgtgaaagcactgaaagccaaaccggttgaaaaagccgcgccagcacccgctgccgcagcaccaaaagcggctccaactccggcaaaaccaatggggccaaacgactacatggttattggccttgcgcgtatcgacgaccgtctgattcacggtcaggtcgccacccgctggaccaaagaaaccaatgtctcccgtattattgttgttagtgatgaagtggctgcggataccgttcgtaagacactgctcacccaggttgcacctccgggcgtaacagcacacgtagttgatgttgccaaaatgattcgcgtctacaacaacccgaaatatgctggcgaacgcgtaatgctgttatttaccaacccaacagatgtagagcgtctcgttgaaggcggcgtgaaaatcacctctgttaacgtcggtggtatggcattccgtcagggtaaaacccaggtgaataacgcggttagcgttgatgaaaaagatatcgaggcgttcaagaaactgaatgcgcgcggtattgagctggaagtccgtaaggtttccaccgatccgaaactgaaaatgatggatctgatcagcaaaatcgataagtaacgtattgtgttgattatcactcagttttcacacttaagtcttacgtaaacaggagaagtacaatggagattaccactcttcaaattgtgctggtatttatcgtagcctgtatcgcaggtatgggaagtatcctcgatgaatttcagtttcaccgtccgctaatcgcgtgtaccctggtgggtatcgttcttggggatatgaaaaccggtattattatcggtggtacgctggaaatgatcgcgctgggctggatgaacatcggtgctgcagttgcgcctgacgccgctctggcttctatcatttctaccattctggttatcgcaggtcatcagagcattggtgcaggtatcgcactggcaatccctctggccgctgcgggccaggtactgaccatcatcgttcgtactattaccgttgctttccagcacgctgcggataaggctgctgataacggcaacctgacagcgatttcctggatccacgtttcttctctgttcctgcaagcaatgcgtgtggctattccggccgtcatcgttgcgctgtctgttggtaccagcgaagtacagaacatgctgaatgcgattccggaagtggtgaccaatggtctgaatatcgccggtggcatgatcgtggtggttggttatgcgatggttatcaacatgatgcgtgctggctacctgatgccgttcttctacctcggcttcgtaaccgcagcattcaccaactttaacctggttgctctgggtgtgattggtactgttatggcagtgctctacatccaacttagcccgaaatacaaccgcgtagccggtgcgcctgctcaggcagctggtaacaacgatctcgataacgaactggactaacaggtgagcgaaatggttgatacaactcaaactaccaccgagaaaaaactcactcaaagtgatattcgtggcgtcttcctgcgttctaacctcttccagggtagttggaacttcgaacgtatgcaggcactgggtttctgcttctctatggtaccggcaattcgtcgcctctaccctgagaacaacgaagctcgtaaacaagctattcgccgtcacctggagttctttaacacccagccgttcgtggctgcgccgattctcggcgtaaccctggcgctggaagaacagcgtgctaatggcgcagagatcgacgacggtgctatcaacggtatcaaagtcggtttgatggggccactggctggtgtaggcgacccgatcttctggggaaccgtacgtccggtatttgcagcactgggtgccggtatcgcgatgagcggcagcctgttaggtccgctgctgttcttcatcctgtttaacctggtgcgtctggcaacccgttactacggcgtagcgtatggttactccaaaggtatcgatatcgttaaagatatgggtggtggcttcctgcaaaaactgacggaaggggcgtctatcctcggcctgtttgtcatgggggcattggttaacaagtggacacatgtcaacatcccgctggttgtctctcgcattactgaccagacgggcaaagaacacgttactactgtccagactattctggaccagttaatgccaggcctggtaccactgctgctgacctttgcttgtatgtggctactgcgcaaaaaagttaacccgctgtggatcatcgttggcttcttcgtcatcggtatcgctggttacgcttgcggcctgctgggactgtaagactgttgtacactaccggggccttttggccccgtttttttatctggaggattaatgacaatcacggacctggtactgattcttttcatcgccgcactcctggccttcgcgatctacgatcagttcatcatgccccgccgtaacggccccaccctgctggcaattcctttgctccggcgtggtcgcatcgatagcgttatcttcgtcggattgattgtcattcttatctataacaacgtcacgaatcatggtgcgttaataacgacatggttattaagcgcactggctctgatgggtttttatatattctggatccgcgttccgaagatcatctttaaacaaaaaggttttttcttcgccaatgtctggattgaatatagccgaatcaaagcgatgaacttgagcgaagatggcgtgttggtgatgcaattagaacagcgtcggctgttaatccgcgttcgaaatatcgacgatctggaaaaaatttataagcttctcgttagtactcaataagttatgaatttagccaaagctatgtttagtgtatttttaataatcagacatagcttaggctatattacctcttcccttatttgttatttattttaacgtttcattgatatataaatccaaatgaaaatcgttatcaataaagcaatgaaataatatattccaacagttgttttatattctcaaaatatgttaaggttgcgccctcatttggggagtagccgatttccagattccggaaatgtacgtgtcaacatactcgttgcaaaacgtggcacgtacggactgaatactttcagtcaggcgagaccatatgcacatcaatcgctatgcctgcatgaacgcgaaaaccatcacggcttgttgttcatgtatgcatgtttgctgggggcgatgatgtgttttatggataccccggtcaggacattgtcatgaatatcactgctactgttcttcttgcgtttggtatgagcatggatgcatttgctgcaagtatcggtaaaggtgccaccctccataaaccgaaattttctgaagcattgcgaaccggccttatttttggtgccgtcgaaaccctgacgccgctgatcggctggggaatgggcatgttagccagccggtttgtccttgaatggaaccactggattgcgtttgtgctgctgatattcctcggcgggcgaatgattattgagggttttcgtggcgcagatgatgaagatgaagagccgcgccgtcgacacggtttctggctactggtaaccaccgcgattgccaccagcctggatgccatggctgtgggtgttggtcttgctttcctgcaggtcaacattatcgcgaccgcattggccattggttgtgcaaccttgattatgagtacattagggatgatggttggtcgctttatcggcagtattattgggaaaaaagcggaaattctcggcgggctggtgctgatcggcatcggcgtccagatcctctggacgcacttccacggttaataagaacgctgccagaggtgaatattaaagtccgtctggcagtcgaacacttcttttgctgccagtgtttgccagacttctggcttcgcacgccaggcaaacggcgtcatctgcaataatgcgacggcttcatcaccgcgaagacgcatcggataacacaactccgcactctgctgtaatgtaaaaccttccagttgttctgcatgaggtgcatgaagatgtacttcattgtaaatcagccccttcagctccatcaaatgtcgcggtcccggcgtggcagtaatgacccagccgccgggcttcactactcgtgctaattcttctgctttacacggcgcgtaaatacgtattatggcgtccatactggtatcggaaaacggcaaacggtggctggaagcgacacaaaaagtgacctgcggatagcgtttcgccgccgcttttatcgctaccttgctaacatccagaccaaacgtggtgatttcgggcaacgcatcggcaaatgcgtgtgtgtaatacccttcaccacagccaatatccagcaccgccgtggccttatcatcaagccgttccctcagttgggcgacaattgcatcacgcagcggctgataatgtccggcatctaagaatgcgcggcgtgcttgcatcatttccgcgctgtcgcccggatcacgagaccgtttatgctgaacgggcagcagattgacatacccttctttcgccatatcaaactgatgtcgctggggacagatatagctgtttttttcacggctaagaggctgatggcaaagtggacaggaaaaagacatgacaactccggcaggatactaaaggccgcaagtgtaacgcgaatcacgcggcgggcaaatatccgaacgccaggagcgaagataaagcatagtaaaaagcctcgcattcgacgaggctttatagcgagattgaagcgtattcacacttcagatcagtggattcgatcagatagctgttacgttaacagctgccggacctttctggccgtcctgaatttcgaactcaacgttctgaccttcagccagagttttgaagccattaccctggatagcggagaagtgtacgaacacatctttgctgccatcagccggagtaatgaagccaaaacctttagactcgttgaaccacttaacctgacctttaatctttgccatttgaaaaattccttagattgttttcttcgcccgcaggcataacatagataaaacactcacattactgcaactggcaccaatataaggctcggcagagaagcggtattcaacgtcaacgtgtttactcaggacttctttactgaaaatgccacacataaacagaactgtacctcgtttaacccgaaatctgttatcacatacaacgttaattatggcaagccatttttaaacatgtctcgatcagacgcacaaatctcgatacgtcttccactttttttgcacacttatgcaacggaatacgcgccgatatatcattgtgcttaaccttgccagttcaggcagatacttaaactggcgtattttctaacatagttcaataagttcagttgttccaggccagtgggagaagttattacatagtgcgtgcaatatcacattttttgctatgcaatgaataaaaagttatatcactttttctcataaaacagtcagttaacggctattaattaccctaaagagaagtcaatccccaaagggattgtaaatttaaaataagaaaaattgatgaatgagcaaaaaaatcaagagagaaacgtttcgctaataaataataccacgcttaatcacaaatccgatgtaaacatcctaataaattaatggggtaaatatctttttctgatatcccgttacgcaaataaataatatgataattatttgaagtcagaccagagttttaatttgaagcagttgcaccatgacagtgcgtataatcaggatgaattgagtaacccttcaacgacggggttactcaagattgaggaaggattatcgttcggcgaccagacgaataatatcttcgtcttcaacgcttttttgactctcaacggtctttttatctgctttctctggttcgtttgcttcgcacaaacgacgtaacagtgcattttgacgtttttgctgatccagcaacgcctcaagcagttcaatctgttcgttagtccgactactggcacgattgataaaaaaccacaagatgagcccgataagaagaaccaccacgcttacaaccaaagacgcaatgttcatcacgccactatttacaacttcgttcatttcaccacctctgagtagaggcgctattctaccactgctggagaggaagaaaatctagtgctgaaaaaatgatatcaccacgggataaactggttaatggcacaaattccgctgaaaaattgtacatcctgatcgcacatcatgttgaatacctgcgcccaaagcagcaagcaagccaacaccacgacaaccagaacgacccatcgaaactttttcactccaatctccgtttcacctaccttatgtcattaaactagcatgcgttagttaaacagcgcctaactatgtcgatattcgtgctttttcggaatgagtcgcttgcttcagcgcatattgccgctacgattaagcgaacataaaaagagaagaggttgtaatgcgattcatcattcgcacagttatgctgatagcactggtatggataggattattactcagcggatatggcgttttgattggaagcaaagagaatgccgcaggattaggtttgcaatgtacctatctgactgccagaggcaccagcacggtacaatacttgcacactaaaagtggtttttttggggataacagattgcccgctgttacgcaaaagcaatatcgtggtcgataatggttaagggcaataaataaccagattctcactcctgagtaaaatactcttatagcaagcgcgtttaatataacgccaccttcaactttatttttctcatgctaaataaagaacctgtctgtttgatattccgacaggttcttactctcatcagaacggatagtcgtgataacccatttgggcagaaattttgcgcgctgcggtatgcaacattgcgacatattcctgtaaacgctcttcagagaaacgcaacgtcgggaaggagatgctcaaaccggcaatgaccacgccaaagcgatcaaataccggtaccgcaatgcatcgcagcccttcttcctgctcttcattatcttcgccatacccctgctcgcgcacctggtccagaacgggtaataacgcttctgtactggtgatggtccgctcggtactgcgtttatactccacgccctcaagaatttgcttcacttcatcgcgatcgcgccatgccagcagtaccttaccaatcgcggtgctgtacagcggattacgacgcccaatccgactatacatgcgcaaattgtacatagagtcaattttgtgaatgtaaacaatactgtcttcgtccagtgcgccgaggtggatagtttctttggtcaggcgggagagctcacgcatctggatatctgcgctacgaattaaatcgacgttttgtaacgcgcgagcgcccagttcaaacaatttcagggtcagggaatatttctcgctctccccttcctgcgccacataacctaaggttttcatggtctgtaaaaagcgataaacggtgcttttactcatcatgacgcgctggctcagctcggttatccctatttcgcgctcttcacccagcgcctgcaaaatgccaaaaacttttagcacggaagatacagaatcaggctgtttatccagatctgcgttagccatttatcacctcattgcgagtgttttataaaaatcagaactgttttttattataatttcgcaccagggtggtcgcaatccatcttttgccggttagttacaattctgcgacatccaccgtgaatatcagtgctagaatcatacccctgttgattattcaccaaagatataaaattcctatgccaaaagttcaggccgacggcctgccattgccccagcgatacggtgcgatattaaccattgtgattggtattagcatggccgtccttgacggcgcaatcgccaacgtcgccctgccaacaatcgccacggaccttcatgccacgccagccagttccatctgggtagtgaacgcctatcaaatcgccattgtcatctccctgctcagctttagctttctgggcgatatgtttggctatcgacgtatttataaatgcggtctggtcgtttttctgttgtctagtctgttctgcgccctttctgatagcctgcaaatgctcacccttgcgcgtgtcatacaaggtttcggcggtgcagcgttgatgagcgttaataccgcacttatccgcctgatctatccacaacgttttctgggtagagggatgggcataaacagctttattgttgccgtctcttctgctgccgggccgacaattgctgcagcaatcctctccatcgcatcctggaaatggttatttttaatcaacgtaccgttaggtattatcgccctgcttctggcgatgcgttttctgccacccaatggttctcgcgccagtaaaccccgtttcgacctgcccagcgccgtgatgaacgcgttaaccttcggcctgcttatcactgcgttgagtggtttcgctcaggggcaaagcctgacgttaattgctgcggaactggtggtaatggttgttgttggtattttctttattcgccgccagctttctcttcccgtaccgctgctaccggtggatttactgcgtatcccgctgtttagtctttctatttgcacatctgtttgctctttctgcgcacaaatgctggcaatggtttccctgcccttttacctgcaaaccgtgctcgggcgtagtgaagtcgaaacaggtttacttctgacaccgtggccgttagcaacgatggtgatggctccgctggcaggctatttgattgaacgcgtacatgcaggattgctgggggctttagggttgttcatcatggctgcggggcttttttccctggttctgctgcccgcgagtcctgcggatatcaatattatctggccgatgatcttatgtggtgctggatttggcttattccagagtcccaataaccacaccattattacctccgcgcctcgcgaacgtagcggtggagccagtggcatgttaggaacggctcgtctactgggtcagagtagcggcgcggcgctggtggcgctgatgctaaatcagtttggagataatggtacacacgtcagcctgatggctgcggctattctggcagtgattgctgcctgtgtcagtggtttacgtatcactcagccacgatccagggcataaaaaaagcgcgtcgatcaggacgcgctttttagtatttacttcatattacttcaggtattcacccgtacgcagagcttcaattcgtttatccagcggcgggtgggtcatgaacaactcactgaggcttttgctcttaccgttaatgcagagagccatcatgctggttgcttcttgcggttcatagctggttttcaggcgctgcagcgcggcaatcattttctcgcgaccaaccagttttgcgctaccggcatcagcatggaattcacgatgacggctgaaccacatggtgataatgctcgccagaataccaaacaccagttccagaaccgttgcaaccgcaaagtagatcagcgggttgccgttgctctcttcaccttcatcacgatttccgcccataaaacccgcggcaagctgcgccagaatacgggaaataaagataacgaaggtgttcaccacgccctgaatcagcgtcatggtgaccatatcaccattggcgatgtggctgatttcgtgagcaattaccgcctcggcttcatccgggctcatgttctgcagcaaaccggtgctgacagcaaccagagaggcatcacggcgcgcaccggttgcaaaagcgttgatgtccggcgcatggtagatagccacttgcggcatagcgatccccgcctgacgagcctgggttgctacagtattgaccagccaacgttccctttcgttacgcggttgctcgatcacttccccgccaacagatcgtaatgccatccatttggacatcagaaggctaacgaaggaaccaccaaaaccgaacagcaaggccatgatcatcagcccctgaacgctgctgctctgtatccctgtcaggctcagtaccagcccgaaaacgaccattacggccaggttcgttagcaggaagagcgcgattcgcatcataattttctttttacctcagtttaacaaaacgcaatatgcgatacccacatcgtatgggttacgcgactattttcaagtctggatagtgcgtaagtcaccagaaagacacaactttacattttgtagcatctgatttacggcatcttgtcgctgttaaaaaatcaggcacaatttcttgtgcctgattgatattacttgacgggagcgggttgttccgcgggtctggctttttcaagcttcgccagatcgagtgcgatattcaccgtctcatccagataaggatccggctcctggtaatctttcggtagatcatccagtttcttcaactccggtttaccttcgcgtttaaagcgttcgttcaaacgcgccagacgcgtcgcatcatcttcattattctctttctcacgcacagcgtaattcagagaaacgatattgcgcttgtccttcatagcgttgaagcgcgcgatatccttcatgatgttctggaactcaggatctttcgcgatacgcgcattatgttccttcagcagctccggttcaaaggccgttaaatctccacttttcacataagtcgcggcatcaatgctatcccacggcagcgcgttatcttcgaatttctcacccgtttccgtttcttcattacccgtcggcatgatgatgtctggcgttacgcctttacgttgcgtactgccgccgttaacgcgatagaatttctggatcgtgtactgcacagaacccagcgctggccattcaggacgtaacatctgatcgtaaatacggttcaaactacggtattgctgaacggtgcctttaccaaacgtcggttcacccacaaccagcgcacgaccgtaatcctgcattgccgcggcaaagatttcactagcgctagcactgaagcggtcaaccagcaccaccagcgggcctttatagaaaacctgtccgtcggtatcgctatcttcacgaaccttgccgttgttatcgcggacctgaacaatgggacccgcaggaataaacagaccggagaggcttacggcttcagttaacgccccaccgccattgctacgcaggtcgatgatgacgctgctgacattctgtttttccagtttctgcagttgcactttgacatcgtctgtcaaacccacatagaagcccggaatatccagcacgccgactttctctttaccgacggtcttcacgctcattttaaccgcgcggtcttcgagacgaatacgttcacgggtcaacgttacagtacgggtcttggtccctttaccagcaggtaaaatttccagacgaactttactgcccttcggccctttaattaaggcaaccacatcatcaagacgccagccaatcacgtcaaccatcggcttgcctgtttgaccaacaccgacaattttgtcaccaacgctgatagctttactcttcgctgccggaccacctgccaccatgctattgataacggtgtagtcatcatccatttgcagcactgcgccaataccttccaggctcaaactcatttcagtgttgaactgttcggtattacgcggggaaagatagttggtatgcgggtcgatttcacgcgcaaacgccgtcattgccaggctgaaaacatcttcgctgttggtttgcgccagacgacgaatggcaaatttgtagcggcgagtcagggtttcacgaatttctttatccgtttttcctgtcagcttcaggcttaactcgtcgaatttgactttactgtcccacagcgcgttcaactcagcctcgtttttcggccagggcgctttgctgcggtcaaggttataagtgtcgttgccggtgaaatccatcggcttttccagtacgctcaaagcgtactggtaacgctcaaaacggcgcttttgcgccagattgtagagatcgtagaaaacgtcgagtttgccactacgcagttcatcgcctaactcggttttctttttcgcgaactgttcaacatcgcttgccagcagcacgttgtggctgtaatcgagcagattcaggtagcggtcaaagattttggcgctaaatgcctgatcgaggtcgaactggcgataatgagaacgggtgaagcggctcgttacgcgctcacttaccgtcgcatgctgcgtctcttcctttaataccggaatttgatcagcacgcgtgatatcttctacagcgaaggtctggcctgctattgcaagcaggccagctaacgcggtaagcctaaaaaacatgttcatgcctggcccggcctccgtttcagaacaccaggtgttctgcgcgcacaatcaaagacataccgctattcagctggacgcggacgccgtctttggtgatttctaatacggtggcatccatcgcgttttgacccgctttcaccttcagggcttgtccgacagtcagagcactaatgtcagaaaccggggtgtgctgttcttcgcgaggtgcttttactgtttttggcgctttctctaccggcttttgcgcacgaggtttacgttcagcgccttctttgcggcgtggcgtagtcggacgtggcttgcgttcgcggcgcggtgcgtcttctttctcaccagcagttgcggcagcttcgcgttttttcgcttgctgttcagcacgctgtgcctgaacacgcgctttcgcttcttcaagctgcttgcgagcatgctctacatgttgctcgtccagctcaccgcatgggttgccgtcaagatcgacacgcgttgcgccgggtttaacaccgtaaagataacgccagctgctagtgtagagacgtaaagcggatcgcaattgcgttttgctcaggttcatttccccagcaacacgatcgaccaaatcctgaaaaataccgattttcagcggacgcgcttcaccttccgcactgaaacagtggggaaaacgttcggccagaaacgcgattacttctttactgctattcaacttaggttgattttccatgaaatttcctgattacaacggacgtagccaacaagcgcaggcatgaacaggcgtcattataatgacgctatcagtaaatgctacgttatccgttgattatcctgcgacgctcgcaaagaattttttgtaatccgtcgttgcaagcactttttcaagctgtgccacaagctgacgtaagccttgctcgtcctcgtctgtaaagcgaccgaagacggtactatcgatgtcgagaacaccaataatctgatttttcaccaccagcggcagaacaatttcagaattactcgccgcatcacaggcaatatgcccgtcaaacacatgaacatcctcgatacgctgcacttgattgcgggcaaccgcagtgccgcacacgccgcgcccgacgggtatccggacacaggcaattttgccctgaaatggtccgagtaccagtgtatcgtcctcaagcaaataaaaacctgcccagtttatgtcagtgagacgctcatataacaacgcactggtgttcgcaagcgttgccagaaaactggtttctcccgccatcagcgcgttaaagtcgcgatttaaatccgcgtaaaattctgttttgttcattatataatcacttggttgtcttacctggatctgccagcctattaaaataagcattaaatgcgttaatgctcaagatcattcccatcatgggttaagattaatgttaattcttattacatttggcacgtcatggctcttaacacaccacaaattacgccgacaaaaaagataacagtgagggcaatcggcgaggaactgccgcgtggtgattaccaacgttgcccgcaatgtgacatgctgtttagcctgcccgagataaattctcatcaaagtgcctattgtccgcgctgtcaggcaaaaattcgtgacgggcgcgactggagcctaacgcgcctggcggcaatggccttcaccatgctgttgcttatgccgtttgcctggggcgaaccgctgttgcatatctggctgttaggcattcgtattgacgccaacgttatgcaaggcatctggcaaatgaccaaacagggcgatgcgataacggggagcatggtctttttctgcgttattggtgccccgctcattctggtgacctccatagcttatttatggtttggtaaccgactgggaatgaatttacgtccggtactgctgatgcttgagcgacttaaagagtgggtaatgctcgatatctacctggtcggcattggcgttgcttctataaaggtacaggattatgcccatatccaggctggtgtcggcttgttctcttttgtggcgttggtgattttaacgacggtgacgttgagtcatcttaatgtcgaagaactgtgggagcgattttatccgcagcgccccgctacgcgtagggacgagaaacttcgtgtctgtcttgggtgccattttaccggctatccagatcagcgtggtcgctgcccgcgttgccatatcccgctacgcctgcgtcgccgtcatagtctgcaaaaatgctgggcggcgctgttagcgagtatcgttttattgttacctgccaacctgttgcctatttctatcatttatctgaacggaggacggcaggaagatacaattctttccggaattatgagcctggcaagtagcaacattgcggttgcaggaatcgtgtttatcgccagtattctggtaccgtttactaaagtgatcgtcatgttcactttactgttgagcattcattttaaatgccagcaaggtttacgcacacgcattctgttactgcggatggtgacctggattggtcgctggagcatgctcgacctgtttgtcatatctttaaccatgagcctgattaatcgcgatcagatcctcgcttttactatgggaccggctgcgttttatttcggcgcagcggtaattttgactattcttgctgtggaatggctggacagccgcttactttgggatgcacatgagagtggaaacgcccgcttcgacgactgaataaccgcttactttgggatgcacatgagtcaggaaacgcccgctagcacgactgaagcgcagattaaaaataaacgccgtatcagtcctttctggctgctgccgttcatcgcgctaatgattgccagttggctgatttgggacagttatcaggaccggggtaataccgtcaccatcgactttatgagcgcggatggtattgttccaggccgtacgcctgttcgttatcagggcgttgaagtcggaacagtgcaggatatcagcctcagcgacgatcttcgtaagattgaagtcaaggtcagcatcaagtccgatatgaaagatgcgctgcgcgaagagactcagttctggctggtgacgccaaaagcaagcttggcaggtgtctccgggctggacgccctcgtcggtgggaactatatcggcatgatgccgggtaaaggtaaagagcaggatcactttgtcgcactcgatacccaaccgaaatatcggctggacaatggcgatctgatgatccacctgcaagcccccgatctcggtagcctgaacagcggtagtttggtctatttccgcaagatcccggtgggaaaagtctacgactatgccatcaatcccaacaagcaaggcgtggtgattgatgtcctgatcgagcggcgttttaccgatctggtgaaaaaaggtagccgtttctggaacgtttccggcgttgatgccaacgtcagtatcagtggcgcgaaggtgaaactggaaagcctggcggcactggttaacggtgcgattgccttcgatagtccagaagagagcaaacctgccgaggcggaagatacctttggtctgtatgaagatctggcccacagccagcgtggcgtaataataaaactggaactgccgagtggggccggattaaccgccgacagcacgccgttaatgtatcaggggctggaagtcggacagctgactaaactggatttaaatcctggtggtaaagtcacaggggaaatgaccgttgatcccagcgtcgttaccctgcttcgtgaaaatacccgcatcgaattacgcaacccgaaattatcccttagcgatgctaatctcagcgccctgctgaccggcaaaaccttcgagctggtgcccggcgatggcgagccacgcaaagagttcgttgttgtgccaggcgaaaaagcactgctgcatgaacctgatgttctgacgctgaccctgaccgcgccggaaagttacggtattgatgcgggtcagccgctcattcttcacggcgtgcaggtaggccaggttatcgatcgtaaactcaccagcaaaggcgtcacctttaccgtcgccatcgagcctcagcatcgcgaactggtaaaaggcgatagcaaatttgtcgtcaacagccgtgtcgatgtgaaggtggggctggatggcgttgagtttctcggtgccagcgccagtgaatggatcaatggcgggatacgtattctgccgggcgataaaggtgagatgaaagccagctatccactgtatgccaatttggaaaaagcgctggagaacagccttagcgatttacccaccacaaccgtgagtttgagtgcagagacgctgccggatgtgcaggcaggaagcgtagtgctgtaccgtaaatttgaagttggtgaagtgattaccgtgcgtccgcgagctaacgcgtttgatatcgatctgcatattaagccggagtatcgcaaccttctgaccagcaatagcgtgttctgggcagaaggcggggcgaaagttcagctgaatggtagtggtctgaccgtacaggcatccccgctctccagagcattaaagggagccattagcttcgacaacctcagcggtgccagcgccagtcagcgtaaaggcgataagcgtattctgtatgcttccgaaacagcggcccgtgcggttggcgggcagattacgcttcacgctttcgatgccggaaaactggcggtcgggatgccaattcgctatctcggtattgatatcgggcaaatccagacgctggatctgattaccgcacgcaatgaagtacaggcaaaggcggtactttacccggaatatgtccagacctttgctcgcggtggtacgcgcttcagtgtggtcacaccgcaaattagcgcagctggcgttgagcatcttgatactatcctccagccgtatatcaacgtcgaaccaggccggggcaatcctcgccgcgactttgaattacaagaggccaccattactgatagccgttacctggatggcttaagcattattgttgaagcgccggaagccggtagcttaggcatcggtacgcctgtgctgttccgtggtctggaagtcggtacggttacaggaatgacgctggggacattgagtgatcgcgtgatgattgcgatgcgcatcagtaaacgctatcaacacctggtgcgtaacaattccgtcttctggttggcaagcggttacagtctggactttggtctgacgggcggcgtagtgaaaaccggcacctttaaccagtttatccgtggcggcatcgccttcgccacgcctccgggtacgccactggcaccgaaagcccaggaaggcaaacacttcctgttgcaggaaagtgaaccgaaagagtggcgtgaatggggaactgcgcttcccaaataatgcccactgctccggcgtgcctgcgccggagcgtttatgctaaactgcgcgcctgtttttttgccagtggtacatgctcgtggcccaacacaccgtttatttcccggacgcctttctgacacaaatgcgcgaagcgatgcctagcacgctcagttttgatgattttcttgccgcctgtcagcgcccgttgcgccgcagcattcgcgttaatacgctgaaaatctccgttgctgatttcctgcaattaaccgctccttatggctggacgcttacgccaattccgtggtgtgaagaaggtttctggattgaacgcgacaatgaagatgcattgccattgggtagtaccgccgagcatttaagtggcctgttttatattcaggaagccagtagtatgttgcctgttgccgccttgtttgctgacggtaatgcaccacagcgggtgatggatgtcgctgccgcgcctggctccaaaacgacgcaaatttccgcgcggatgaataacgaaggggcaatccttgccaatgagttttccgccagtcgggtaaaagtgttacatgccaatatcagccgctgtggtatcagtaatgttgcgctcacacattttgatggccgcgtgtttggtgcggcagtgccagaaatgttcgatgccattttgctggacgctccctgctctggcgaaggcgtggtgcgtaaagatcccgatgcgctaaaaaactggagtccagaaagcaatcaggaaatcgcagctacacaacgggagcttatcgacagcgcctttcatgcattacgtcctggtggtacgctggtttacagcacctgtaccttaaaccaggaagaaaacgaagccgtttgcctgtggctgaaagagacttaccccgacgcagtagagtttttaccacttggcgatctcttccctggtgcaaacaaagcgctgaccgaagaaggctttttgcatgttttcccacaaatttacgactgcgaaggcttcttcgttgctcgtctgcgtaaaactcaggcgattcccgccttacccgcccccaaatacaaagtcggtaattttccgttcagcccggtgaaagatcgcgaagctggacaaattcgtcaggcggctacaggtgttggcttaaactgggatgaaaacctgcgcctctggcagcgtgacaaagaactgtggttgttcccggtgggcattgaagccctgatcggtaaagtccgattttctcggttggggattaaacttgccgagacgcacaacaaaggttatcgctggcagcatgaagcggttattgctcttgccagtcccgataatatgaatgcattcgagctgacaccgcaggaagcggaggagtggtatcgcgggcgcgatgtttacccgcaagccgcgccagtggcggatgatgtattggttactttccagcatcaaccgattggtttagccaaacggattggtagccgattgaaaaacagctatccgcgtgaactggtgcgcgatgggaaactttttaccggtaacgcctgacagcgcacaaaaaaagcgcactttttgactggcacattcggctgcctcaactaggctgaaaaatggtgcgatcggactggtcgtaccacaatcggcagctaaatggagagcacgaagatgaaaaccagtgtgcgcataggcgcttttgaaatcgacgacggcgaattacacggtgaaagcccaggtgatcgaacgttaaccattccttgtaaatctgaccccgatttatgtatgcaactggatgcctgggatgctgaaaccagtatccctgccctgctaaatggcgaacactctgtcctttaccgtacccgttacgatcaacaatctgatgcctggattatgcgtcttgcctgatccaaaaagaacccgtcggcatggcgggttatttgtcctggttattcccccgttgtaaaatctctcctaaacttaacggtacggcaccacacttcggggatgaaatgttcgcgctggtactttttgtttgctacctggatggcggttgtgaagatattgttgtggatgtctacaacacggaacagcagtgtctttattctatgagcgatcaacggatccgccagggcggttgttttccgattgaggattttatagatggtttctggcgacctgcacaggagtacggtgatttttaattattgcaattgcacaagagtcagttcgcccccaaagacagcaccggtatcaatataatgcaggttgccaatatccacgcgatgtcgcaacggtgtatgaccaaaccagaaatgatcagcacctgtaattccctgccctttttggcgttcacctaatcggctgcggctccacaagacctgatgcaaatcaacgtccttttgccattcataaacatcatctggataatcggcatgagcaataatatgcttgccggtgcgactgtgtacttcaagaataaagggcaaatgctgacatttttccagcgccgttttcgcttgtttctgttgattatctgccagcgcaataaaccagtcgccgccattcatcaaccacaaagacatctgctgggatgccagcgcatccatcgccatctgttcatgattgcctcttaccgcacaaacccaatgttgttccagtaactgcagacaacgtaaactttgcggcccacgatcgataacgtctcccacactgataagtaaatctcgccacggatcaaaacgacaatgccataatttgcggcgcaactgctcaagacaaccgtgtatatcgccagaaagccagatatgtcgccattgatgacccgcaattctctgataaacgggcgcaggctgtttcatcaatattttcctcccgcgctaaagatcacataatcttaacaagaatgttaaaaaacgctggactcagacagtagagtgtgtgttatggttgactataaagtcagcgaaggaaatgcttctggcttttaacagataaaaagagaccgaacacgattcctgtattcggtccagggaaatggctcttgggagagagccgtgcgctaaaagttggcattaatgcaggcttagttgccttgccctttaagaatagatgacgacgccaggttttccagtttgcgtgcaaaatggtcaataaaaagcgtggtggtcatcagctgaaatgttaaaaaccgcccgttctggtgaaagaactgaggcggtttttttattggaaatcaaaaggctattttaggtaattaacagagtttttcagctcgttctataaacggtgccagactcattttttcgccgggattgttaggatcatcaatctgaatcacgctaatgggttgggcattggtcttcccactggcaacttccttttgtgcgatatcgtttaaaggatactgcacgagggtactcggattaataacatacaaagcattacccggtcggcaagtcagcatcacctcttcgcgattaaacgcccatttgtctttacccacttcaaaacgactgacggtaatcacctgcggtgcagccagcgccgctgcagaactggtgagtaacagaaacgccagaatactttttttcatcattttcgtaatccatcaaaaaggttcgagagtcgcaagcaggctgatgatcaccagcactaccgcacctatcgcccattcgagtttagtcatccacacaaaccagggtgccgcacgatcttcatcctgcctcatgcgcggtacaagaacataacgattagccagcgcaatgaccaccataatcatcaccaggatggctttgagcaataagagttggccccagtaagtcgtaagcgtggggggaaatccggtaatcaacaatgcattaagcacgccgcttgccagtacgccgatcaccgcaaaatgcccgcaccaggaaaaacgcatcagcgcctgaatagcctggtgtcgccaacggcctttgatgagttgcatacaccagagcaccggcagtaatcccccaaaccacgccgccgcacaaatcaggtgaatcgcgtgattagtctgatggattttcgctgttaccccttcattcagcgtcgcatgccccactcccgccagcagaataaattgcgcggtagtgagcataaacagcaaacgtggcatattccgcggttgcataagggcgacgatcaacgttacgagggcgagaacaatttgccataaccagatgccaccaaactgcgtttgcaaaacagcctgccaaatgtttgggctaaatacatctgtccatcccgttcccatcaacccgccctgaacggcgagcattgcagtggcactgatcaaactccagacggcagcgtgctgttgtaaacgcagaaaacgcttcgccagcaagcgacgaatcgtcaagggggccagccaggcaccgtacattgcgaagccaaaaaccagcatcaggctggtgaaatggataaatcgcagcgcgatccaggtaaacgccagcatgatttatttcacgctaaaggtgtagtgtcctttcgttttatgcccgtccacgctaacaacatgccagtcaacggtgtaggttccgggtttcaggctatcggccagtggaacaatcagttgcttttggtcctgctcatttcgcttcgccggtaatgttttaatattttcgttttttggccccgtgatttttgcaccactgaatcctgtttcaacaccttcgctgaagtttaaagtgattgcctgcggtgcagctgtcacttgcgcgtttgccgcaggatactgatgcgttaaatgcgcatgtgcccagacggaaggtgtcaccaagctagtggtcaggattgccagcgcgtagcgaagggagcgtgcagtactagccatattatctattcctttttgtaataacttttttacagagcataaccttgtctaatgtctgagtcgaggatcatcaattccggcttgccatcctggctcactcttagtaacttttgcccgcgaatgatgaggagattaagaatgctgaagaatctggctaaactggatcaaacagaaatggataaagtgaatgtcgatttggcggcggccggggtggcatttaaagaacgctacaatatgccggtgatcgctgaagcggttgaacgtgaacagcctgaacatttgcgcagctggtttcgcgagcggcttattgcccaccgtttggctagcgtcaatctgagtcgtttaccttacgagcccaaacttaaataaaacttatacagagttacactttcttacataacgcctgctaaattatgagtattttctaaaccgcactcataatttgcagtcattttgaaaaggaagtcattatgagcttctggaaagttgcagcagcgcaatatgagcctcgtaaaaccagtctcaccgaacaggtagctcatcatctggagtttgtgagggccgccgccaggcaacaatgtcagctgttagtttttccaagcctttctttactggggtgtgattatagccgacgtgcccttcctgccccacccgatctcagtctgttagacccgctttgttatgccgcaacgacctggcgaatgaccatcattgccggccttcccgttgaatataacgatcgctttattcgtggaattgcggtgttcgcaccgtggcgaaaaacgcctgggatctaccatcagagtcatggtgcatgtctgggccgtcgttccagaaccatcacggtggtcgatgaacaaccgcaaggtatggatatggacccgacctgtagtctgtttactacagggcaatgtctgggagaacccgacctgctggcgagcgcccgtcgcttacaattttttagtcatcagtacagcattgccgtgctgatggcaaatgcccgtggtaacagtgcactatgggatgaatatggtcgtctcatcgttcgcgccgatcgtggtagtttattgttagtcggtcagcgtagtagtcagggttggcaaggcgatatcattccattacgctaagctttttcggcctggagcatgccatgttgcgcattatcgatacagaaacctgcggtttgcagggagggatcgttgagattgcctctgttgatgtcattgacggaaaaatcgtcaaccccatgagccacctggtgcgccccgatcgtcctattagtccacaagcgatggcgattcatcgcatcaccgaagccatggtcgccgataaaccgtggattgaagatgtgatcccacactattacggtagtgaatggtatgtcgcgcataacgccagctttgaccgccgcgtactgcctgagatgcccggtgagtggatttgcactatgaaactggcccgtcgtttgtggcctgggatcaagtacagcaatatggcgttatataaaacacgcaagctcaatgtacagacgccgccgggcctgcatcatcaccgcgcgttgtatgactgttatatcaccgccgcgttgcttatcgatattatgaacacctccggctggacggcagaacagatggccgatatcaccggacgtccgagcttgatgacgaccttcacctttggcaaataccgtggcaaagcggtttccgacgttgccgaacgcgatccgggctatctgcgctggttatttaataacctggacagcatgagcccggagctgcgtttaacactgaaacattatctggaaaatacttaatccgcaggcgtagcgggtaatgttccctgcgccagcgcgaccagaaaagcatattccatcgctacgccttcgtagcttttaaagcgaccagatttaccgccatggccactgtccatgtcggtacagagcaataaaagatggtcatcggttttcagctcgcgcaatttagcgacccattttgccggttcccaatattgcacctgagaatcgtgcaaaccggtcgttaccagtaaatgcggataagcctgtgcggtgacgttgtcatacgggctgtagcttttcatgtactcgtaatattgcggatcctgcgggttaccccactcttcaaactcaccagtggtaagaggaatactttcatcaagcatcgttgttacaacatcaacaaacggtacctgggcgataacgccgtggaataattccgggcgttgattaattgcaacgcccatcaacatgccccccgcactcccgcccatcgcataacaaaggctaggagagccatagcccagttttaacaatgcatcgcaggcatcaagataatcattaaacgtatttttcttcttcagaaattttccgtcttcgtaccattgttgccccagctcaccaccgccgcgaacatggacaatggcgtagacaaagccacgatctaacaaactcaagcggctaaaactgaaatcggcatcaatacttgcgccgtaagaaccatagccatacaccagcaacgggttgtgtcctttgcgaaaatgtttgcgatggtagaccaagctaaccggaacttcgacgccatcacgggcgactatccacaggtgttcactgcggtaattcgccgcataaaaaccaggaacttccgtttgttttaatacacgacgctcaccggtatccatatccagttcaaacaaagtgtctggtgtagtcatggaagaataaccataacgcaatcgcgcggtttcaggttctggattgtaggcaatccaggtcacataggccggatcatcaaaggcaataccaatgacttcccgggtcttgcggttaatttggcgcaaactggttaacccgcgctgacgctcttcaaccaccagccagtcggtaaacagcgtaaacccttccagcatgatgttttcgcgtggcggaattaactcttcccactgttgctcatcacgcatacgggtacggtataagccaaagtttttgccgtggcggttggaacgcagataaaaacgatgctggtagtgatcaaggctgtattcgtgatctttgcggcgcggcagaaaaacaaacggctcggcatcggccatttccgcgtccagcaggcgaacttcactggtggtggcgctggccaaatgaatgactacatagtgcttgctggtcgttttatgcaggctgacgtaataggtatcgtctttttcttcgtagatcagtttatcttggcttgctggcgtaccgatggcgtgacgccagacctgataaggcagcagcgtcaccggatgcttgcgaacatagtagaaaatccaggagtcatttgcccagacaaagctgggttcaacgttatccagcagttccgggtaccagttaccagtttccagattacgaaaacgaatgccgtactggcgtcgggaaagaaaatcttctgccagcgccataatggtgttatcgggcgtaatcgccattccgcccatgctataaaactcactatgagctgcgcgcttattggcatcgagcaatgtttcccactcatcccactcttcactgaatgcgctttgacgctggtagatagcatattcacagcctggttcataaatatgccgatagcggtagccatttttgatgtagggcgcagaaacttctcgttgcggaatgcggtcgatgatttcctttaagatgcgatcctgcaaggcttgttgactggccatcacccgatgaccgtaactattttcttgttgcaggtagtccaggacttctggctgagaacgcgtatcgtcccgcagccagtagtaattatcgatgcgcgtatcgccatgaagcgtcatggcgtggggaatgcgggcggcttttggtagcatgttattgttctttctggttgaaacatcttataagggtggcaaaactcaccggggatgcaagcgaaacaggggagtcattgcttagatgatgacaggtaatggcgcggatatcgaatgttatgcagacagagaaaatcagcctgttcaaatggctgtgcgattctggatagcccgaaatagtcaacttcaggctatccagagagcggaattattccgccaaagtgcgtttttgctgttcgagatcgcgttcaatgccgtcacgaacatcctgggggattttcagcgcgtcacccagtgcattcaggtaactgcgttccataaaatggtcaatatcaatagccgcgcaactcaggaaatagatttccagcgcctcttcttcattgcggaccccggtagccaggcgttgtggatccagcggttgttcgattgcctgctcaatgagtacacgcccctgctcttccacgccggctccacgcaattgctggtcgattgccgcacgttctttggcatcaatatgaccatcacttttagcggcaaagaccagcgcaaggatcaaacgtgctgtacgctcatccagcggcgtactttgcgcgccaaactgcggttcgtcctgatgcgccgcgcgaattttatctttgtatttattccacagcaccgtacccgctaccgctccgccgccaaccagtaacgcgttggtgccatatttcgtaagaagtttacgtgcacttttatttgcgaccagcagcccagccagtccgcctaatgcgcctggcactaacagtttgaccaatccctgatccgcagagctggaggtagaagaactgctttgcccaagcagggattgcagttgatttaaccagttagccatatttgctcctcaataaccatttttagtgcctgtagcatagcggatgaggatgtcagaaaatgtatatcgagacaaaagatgcgcaaataagcggggcggtaggccgttattcaaagaaattcgcgccaggtaaggtatttactgtatatcaggtgataagggtattttaggtgaaagtagtttgtcgttttgagtggcattgtttgatgctgattgcccgatgcgacgctgttgcgtcttctcaggcctacgattgtggtgcgttctggggcggacaaggcactcgcgccgcatccgccaacagtcaatcgaattatcagaagccattaacgccgctgatattccgccattcccgctttgcagtccacgctgacctggtaatgaatatcggcacttttaccacgcacggttagcggtacactccatttatcatctttaccctgaatgtcctgcaaactgacccaagccacgggatcggcctgaccgacaattttttgatcatctgcccaacgcgccacgcgattttgttgataatcacgttttacgctcgcggcaattccggcagcatccagatcttcacactttgggaaagtgacgctcttgctggtttcattattggcagcgaaaacacttgcgcaggcagaaaccaacaacagccctaaaaacgcccctctttttttcatgtttttctccatagcacaatgattcaggagaaagcatggtacaaattgtcaggagcgcaagttgcttcaggccgcgtgactggcatcttcctcttcggattcagcaccgacgacctgtggggacggtaatttgccggttttcagaatggtgctcagcacatctttttgttctgccagccataggctaagggcttcacgttgctcgtcttccatttgcactggagaatttgtcagccaggtgtcaagcagatccgccgtatcaagcattttgtcataagcatcggcttcctttttgctggtaaagctcattttctcttcgccctcacgaatgactacgtatttaacttcaaccgccatttgcagcctctcataataactgtgattttatacagtatatttcttttcggttgagaaatcaacatcagcaataaagacacacgcaaacgttttcgtttatactgcgcgcggaattaatcaggggatattcgttatgacgttattaggcactgcgctgcgtccggcagcaactcgcgtgatgttattaggctccggtgaactgggtaaagaagtggcaatcgagtgtcagcgtctcggcgtagaggtgattgccgtcgatcgctatgccgacgcaccagccatgcatgtcgcgcatcgctcccatgtcattaatatgcttgatggtgatgcattacgccgtgtggttgaactggaaaaaccacattatatcgtgccggagatcgaagctattgccaccgatatgctgatccaacttgaagaggaaggactgaatgttgtcccctgcgctcgcgcaacgaaattaacgatgaatcgcgagggtatccgtcgcctggcggcagaagagctgcagctgcccacttccacttatcgttttgccgatagcgaaagccttttccgcgaggcggttgctgacattggctatccctgcattgtaaaaccggtgatgagctcttccggcaaggggcagacgtttattcgttctgcagagcaacttgctcaggcatggaagtacgctcagcaaggcggtcgcgccggagcgggccgcgtaattgttgaaggcgtcgttaagtttgacttcgaaattaccctgctaaccgtcagcgcggtggatggcgtccatttctgtgcaccagtaggtcatcgccaggaagatggcgactaccgtgaatcctggcaaccacagcaaatgagcccgcttgcccttgaacgtgcgcaggagattgcccgtaaagtggtgctggcactgggcggttatgggttgtttggtgtcgagctatttgtctgtggtgatgaggtgattttcagtgaggtctcccctcgtccacatgataccgggatggtgacgttaatttctcaagatctcagtgagtttgccctgcatgtacgtgccttcctcggacttccggttggcgggatccgtcagtatggtcctgcagcttctgccgttattctgccacaactgaccagtcagaatgtcacgtttgataatgtgcagaatgccgtaggcgcagatttgcagattcgtttatttggtaagccggaaattgatggcagccgtcgtctgggggtggcactggctactgcagagagtgttgttgacgccattgaacgcgcgaagcacgccgccggacaggtaaaagtacagggttaaacccggcaaaaaaacgctacaaaaatgcccgatcctcgatcgggcattttgacttttacagcttagcgccttctacagcttcacgcgccagcttagtaatgcggtcgtaatcgcccgcttccagcgcatctgccggaaccagccaggaaccaccgatgcacagcacgcttttcagcgccaggtagtcacggtagttagccggagaaataccacccgtcgggcagaaacggacctgggagaacggacccgcgatcgcctgcagggctttcacgccgccgttagcttcagccgggaagaatttgaactctttcaaaccgtagtccatacccagcatcagttcggaaacagtgctgatccccggaatcagaggaatagtcccttcggtagcagctttcagcagcggctcggtcagacccgggctaattgcgaactgtgcacccgcttcagtgacttctgccagctgctgtggattcagcaccgtaccggcacccacaatcgcttcaggcacttctttggcgatagcacggatagcgtcaactgcacactcggtacgcagagtcacttccagaacgcgcaccccaccagcaaccaacgcttttgccatcggcaccgcgtgttccagtttttttaccacgataaccggtacaaccgggccggtggtcaggatactttctgcacttgttttccagtttttcatcagagttttctctcgcctgattacaaatttgtcgtcttaaaaagtgatacaggttgcgccctgttcggcaccggacagtttttcacgcaaggcgctgaataattcacgtcctgttcccacgcgactcgcgctcaggtcaggaatgtgcggttcgcgagcagccagttccgcttcgtctaccagcagcgtcagttcgcctgtctgtccattcacacgaatgatgtccccgtcgcgcacttttgccagcagcccgccatcgtaggcttctggtgttacgtggatagcactcggcactttaccactagcgccggagagtcgtccatcggtaactaacgcaattttgaaacaccggtccaataatacaccaagtggcggcatgagtttatgtaattctggcattccgttcgcttttggcccctgatgacggacaacaacgacacaatcgcggtccagcaaacccgcttcaaaggccggcataacgtcatgctggctttcaaaaacaaccgctggcgcttcaatcacctggttctcaaccggcacggcagaggttttcataaccgcacggcccaggttaccgcttaacacttttgtcccaccatgatgagagaaaggttgttcgaaggaagcgatcacattgctgtcgagacttttttccgccccttcccgccagtccagttcaccattattcagccatggttcaagggtataacgagacagaccaaaacctgccaccgtattgacatcttcatgcagcaggcctgctttgagcagttcacgcaccagaaccggtacgccacctgccgcctggaagtggttaatatcggccggaccgttcgggtagagacgtgccatcagcggtacaacatcagaaaggtcagagaagtcatcccagttaatctgaataccggccgcgcgcgccatcgccaccaggtgcatggtgtggttagtggaaccaccggtcgccagcagtgcaacgataccgttcaccaccactttctcatcgatcatcttaccgatcggcatccattcattaccattaccggtcatgcgtgtaacctgacgcgcagctgcggcggtcaaagcatcgcgcagcggagaatccggatgaacaaaagaagagcctggcaactgcatccccataaactccaccaccatctggttggtgttggcagtaccgtagaaagtacatgttcccggcgcatggtaagacgcggcttcactctccagtaaggccatgcggtccactttaccttcggcataaagctggcgaatacgcactttttctttatttggcaaaccgcttgccatcggtccagacggcacaaacaccgcaggcaaatgaccaaagctcagggctgccatcgtcagacccgggacaatcttgtcgcacacaccgaggaacagagcaccatcaaacatgttatgggacagccccaccgccgcagacatcgctatcacttcgcggcttagcaggctcaattccattccatcctgcccctgggtgacaccatcacacatcgccggaacaccgcccgcaacctgaccaaccgcattcgcttcatgcagggctttacgaatgatttctggatagtgttcataaggctggtgcgcggagagcatgtcgttataggaggtgatgatggcgatattgttacgcaacatgcttttcaaagaggctttgtcttctggctggcaggcagcgaaaccgtgtgccaggttaccgcatgccaactggctacgatgaacggtgctagttttcgcttgttctatccgggcgagataagcagagcgagtctcgcggctacgttcaatgattcgatttgttacgcgtaacaattgtggattcataaaggctcctgaaattgagttgtcagagcaggatgattcacaacgcgtttcattcagaggatttatgactgaaacgcctgtaaccggagctcatagggcaaaaacgtttcagtcagtgtaataaaaaaagcctcgtgggtgaatccgcacgaggcctgaaagtgtaaaaattgttctacaatctgcgcaagatcatgttaccggtaaaataaccataaaggataagcgcagatattactcaaactcattccaggaacgaccatcacgggtaatcatcgccacgctggcaacgggtccccaggttccggcctgatacggtttcggcgcatcattgtccatcgcccacgcctcagtaatggagtctacccatttccaggcttcttccacttcgtcgcgacgtacaaacagtgcctgaataccacgcatggtttccagcagcaaacgttcataggcatccgccagatgcgtctgattaaaggtttcactatagctcagatccagcttggtgatttgcaggttatgtttgtggtcaaggccaggaactttattcagtacctggatatccacgccttcatcaggttgcagacggatagtcagtttattctgcggcagatcctgccagctttctttaaacagattcagttcaggtgttttgaaatagaccacgacttcagaacatttggtcggcagacgtttaccagtacgcaggtagaatggcacaccggcccagcgccagttatcaatgtcgacgcggatcgccacgaaagtttctgtattgctgctcttgttcgcgccctcttcttccagatatcccggcacttttttgccctgggcgaagcccgcagtatattgcccgcgtacggttttttcgcgtacgttggagcggtcgatgcggcgcagagacttcagtactttcactttttcatcgcggatgctgtctgcgctcaggtcagacggcggagacatcgcaatcatgcaaagaatttgcagcaggtggttctggatcatgtcgcgcatctgaccggctttatcaaaatagccccagcgcccttcgatccccacttcttctgccacggtaatctcaacatgatcaatggtgcgattgtcccagttattcacaaacagggagttagcaaaacgcagcgccaacaggttcagcaccgtttctttaccaagatagtggtcgatacggtaaacctggcactcctcgaagtattcgccaacctgatcattgatttcctggctggtcgccaggctcgtccccagcggtttctccatgactacgcgtgccggtttagcattcagttttgcctcgccaagccctttgcaaattgcgccaaaagtgctgggcggcatggcaaagtagttaatggtgatacgatttttttgatccagcatcgcgccgagacggctgaatgcagcagtgtcattgacatcgagattacaaaaatccagacgtgcactcagggtgtcccataaaccttcatcaatggtttctttcatgaaagtttcgagcgcctcgcggacaactttggtatatgccgctttatcccagtcagcacgccctacgccgataatccgggtgtccgggttgagctgaccggctttttccagttgatacagggaaggcagcaatttacgacgcgcaaggtcgcctttcgcgccgaaaatgaccaggtcacaggcctgggctgtttgcgttaccgccatgtcattctccttaagttaactaacccggtacttaagccagggtatacttgtaattttcttacggtgcactgtactgcttttacgagcttgcgaaaactgtaaacgcttatccacccgtgcgattacgggaaaagcgcgcaaagtgcggcaaaactgataaaaaaatcatcgttttccattgggtaaaaatctgacactgatcatgttatgaaaaaaaataacaacttttttatctgcttttgtcattaacacggcacacaggcgtaatatctgacaaaactgcatttcgatttctttcagtgcggaaatcgtcattacccgtgagtctctttacatcatgaatatgctggaaaaaatccagtctcagctggaacatttgagcaaaagtgagcgcaaagttgccgaggtcattctggctagccccgataacgcgatccatagcagtattgctgctatggcactggaagccaatgttagcgaaccgacggtgaatcgtttctgtcgcagcatggacacgcgcggttttcctgattttaaacttcatctggcacagagtctggcgaatggcactccctatgttaatcgcaatgtcaatgaagatgacagcgttgaaagttacacagggaaaatatttgagtccgcaatggcaacgcttgatcatgtccgtcatagtctggataaatctgccatcaaccgcgccgtcgacttgctcactcaggcaaaaaaaatcgcctttttcggattaggctctagtgccgccgttgcccacgatgcgatgaataagttctttcgttttaatgttccggtggtgtactccgatgatatcgtgctgcaacgcatgagttgtatgaattgtagcgacggagacgtggtggtgctgatttctcacactggaagaacaaaaaatctggtcgagctggcgcagctggcacgcgaaaacgacgccatggtgattgccctcacctctgcgggtaccccgctcgcccgggaagcaacgctggcaattaccctcgacgtaccggaagatactgacatttatatgcccatggtttctcgacttgcacagctgaccgtgatagatgtgctggcgacaggatttactttgcgacgcggtgcaaaattcagagataacttgaagcgggtcaaagaagcgctgaaggaaagccgttttgataagcagttacttaatttaagtgacgatcgctaaaaacgactgtcactgtcctaatcttatacgacatccgaatgagattaatttatcgccatcgcggcgttatttcattcggatttcatgttcaagcaacacctggttgtttcagtcaacggagtattacatgtccagaaggcttcgcagaacaaaaatcgttaccacgttaggcccagcaacagatcgcgataataatcttgaaaaagttatcgcggcgggtgccaacgttgtacgtatgaacttttctcacggcagccctgaagatcacaaaatgcgcgcggataaagttcgtgagattgccgcaaaactggggcgtcatgtggctattctgggtgacctccaggggcccaaaatccgtgtatccacctttaaagaaggcaaagttttcctcaatattggggataaattcctgctcgacgccaacctgggtaaaggtgaaggcgacaaagaaaaagtcggtatcgactacaaaggcctgcctgctgacgtcgtgcctggtgacatcctgctgctggacgatggtcgcgtccagttaaaagtactggaagttcagggcatgaaagtgttcaccgaagtcaccgtcggtggtcccctctccaacaataaaggtatcaacaaacttggcggcggtttgagcgctgaagcgctgaccgaaaaagacaaagcagacattaagactgcggcgttgattggcgtagattacctggctgtctccttcccacgctgtggcgaagatctgaactatgcccgtcgcctggcacgcgatgcaggatgtgatgcgaaaattgttgccaaggttgaacgtgcggaagccgtttgcagccaggatgcaatggatgacatcatcctcgcctctgacgtggtaatggttgcacgtggcgacctcggtgtggaaattggcgacccggaactggtcggcattcagaaagcgttgatccgtcgtgcgcgtcagctaaaccgagcggtaatcacggcgacccagatgatggagagtatgattactaacccgatgccgacgcgtgcagaagtcatggacgtagcaaacgccgttctggatggtactgacgctgtgatgctgtctgcagaaactgccgctgggcagtatccgagtgaaaccgttgcagccatggcgcgcgtttgcctgggtgcggaaaaaatcccgagcatcaacgtttctaaacaccgtctggacgttcagttcgacaatgtggaagaagctattgccatgagtgcaatgtacgcagctaaccacctgaaaggcgttacggcgatcatcaccatgaccgaaagcggtcgtaccgcgctgatgacctcccgtatcagctctggtctgccaattttcgccatgagccgccatgaacgtacgctgaacctgactgctctctatcgtggcgttacgccggtgcactttgatagcgctaatgacggcgtagcagctgccagcgaagcggttaatctgctgcgcgataaaggttacttgatgtctggtgacctggtgattgtcacccagggcgacgtgatgagtaccgtgggttctactaataccacgcgtattttaacggtagagtaagtacgttgccggatgcggcgaaaacgccacatccggcctacagttcaatgatagttcaacagatttcgaatattctgaagcaaacttgaacttatcatcaggcgaaggcctctcctcgcgagaggcttttttatttgatgggataaagatctttgcgcttatacggctggatttcgcccggtttgcgagttttcagcaattttagtatccaggtgtattgttctggtcgcggaccaacaaaaatctcgacttcttcattcatccgccgcgcaatcgtatgatcatccgcctctaacagatcatccatcggtgggcgcacctgaatcgtcagacgatgcgtcttgccatcataaatcggaaacagcggtacaacgcgcgcacggcacactttcatcaaacgaccaatcgcgggcaacgtcgctttataggtggcaaagaaatccacaaattcgctgtgctctgggccatgatcctgatcgggtaaataatatccccagtacccctgacgtacgctctggatgaatggtttaataccgtcatttctcgcatgcagacgaccgccaaagcgacgacgcaccgtgttccagacataatcaaaaaccgggttgccctgattatggaacatcgctgccattttctgcccttggctggccatcagcatggcaggaatatcgacggcccaaccgtgcggcaccagaaagataactttctcgttattacgccgcatctcttcgatgatctccagcccttgccagtcaacgcgcggctgaattttctccggcccgcgtattgccaactcagccatcattgccatcgcttgcggcgcggtggcaaacatctcatcaacaatcgcttcgcgttcagcttcactacgttctggaaagcagaggctcagattgattaacgcacgacggcgactgctttttcccagtcgtccggcaaaacgtcccagccgtgccagaatgggatcacggaactttggcggcgttaaagcgatacccgccatcgctgctacgcccagccatgctccccagtagcgcgggtggcgaaaggatttatcaaactcaggaatgtattcgctattattttttttcgtttccatgcttttccagtttcggataaggcaaaaatcaatctggtgatagtgtagcggcgcaacttgccccgcaccaaataaaaaaagccggtactgactgcgtaccggctgcgaatggatgttaattaatcaaaccgtagctgcggcacaatctctttggcctgcgccaggaattcgcgacgatcggagccggtcagcccttcggtacgcggcagttttgccgtcagcgggtttacggcctgctggtttatccatacttcatagtgcagatgcggcccggtactacgtccggtattaccggaaagcgcgatacggtcgccacgtttcaccttctgtcccggtttcaccagaatcttgcgcaagtgcatataacgcgtggtgtagctgcgaccatgacgaatagccacataataacctgctgcgccactgcgtttggcaaccaccacttcaccgtcacccacactaagcactggcgtaccctgcggcatggcgaaatcaacacctctgtgtggtgcaacgcgaccggtcaccggattagtacgacgcgggttaaaattagagctgatacggaactgtttcgccgtcgggaatcgcaagaatcctttcgccagaccagtaccgttacgatcgtagaatttgccatcttcagcgcggatagcgtaataatctttaccttcactacgcaaacgtacgcccagcagctggctttgctcacgtttaccatcaagcatttctcgagacattaacaccgcaaattcatcgccttttttcagtttgcggaaatccatttgccactgcatggctttaatcactgcgctcacttcggcgctggttaaaccggcgtttctggcgctggcaacaaagcttcccccgacggtacctttcagcagattgttaacccactctccttgctgcatttcgctggtcattttaaaaccgttagcggcagtacggtcataggttcgggtttcacgacgagacacttcccaggtgaggcgctgcagttcgccgtccgcggttaatgtccaggagagttgttgaccgattttcaggttacgcaattctttgtcggccgcagccagttgggtgatatcacccatatcaataccatactgattgagaatgctgcttagcgtatcgccagtggaaacaacatattcatgcacgcccgcttcaccggcgattttgtcatccagttcgtcctggggaatggcttcatcttcttgtgcagcttgatcaatcggctcactggcttcaggtaagaggctacgaatttcgttctgttccagctcaatggttttgacaattggcgtggcatcacggtgataaacataaggccgccagacagcgacggccagagtaagaacggtgaggctccccaacataacgcggtgtggtcgcggtaaattattaaacgccagggcgacagagcgggctatctgttgcacgtaatcacttcctcattaatctcctttcaggcagctcgcatactggttggctaattgactcaggaattcactatagcttgttttacccagtttgatattcgtccccaggggatccaacgttcccatacgaacggatgtccctcgtgcgacgctctcaacgaccgctggcctgaactgtggctcagcaaaaacgcaggttgctttttgctcaaccaactgtgttcttatttcatgtaaacgctgcgcgccaggttgaatctcagggttaacggtaaaatgaccaagcggtgtcagtccaaactgtttttcgaaatagccgtaagcatcgtgaaaaacgaaataacctttccccttgagcggcgcgagctcgttaccaacctgcgtttcggtactggctaattgtgcctcaaaatccttcaggttggcgtcaagtttggctcgactttgcggcataagttccactaattttccatggattgcaaccgctgtagcccgcgctatctctggggaaagccaaagatgcatgttgaaatcgccgtgatggtgatcttcgtcacttttttccgcgtggtcgtgatcatcatcatcgccgtgaatacttttcatcagtagcggtttcacatcttcaagctgcgcaatcgttacctgcttcgctcctggtaatttgcttaccggtttttgcataaacgcttccatctccgggccaacccaaacgactaagtccgcgttctgtaagcgttttacatcgcttgggcgcagactataatcatgttcactagcgccgtcaggaagtaaaacctctgtttctgttaccccatcagcaatggcagaagcgatgaacccaacgggtttaaggctagcgacaacggcggcatctgcggcctgtgttgcacctccccagagagcggcggataatgctgcgaaaagaagcgtttttttatgtaacataatgcgaccaataatcgtaatgaatatgagaagtgtgatattataacatttcatgactactgcaagactaaaattaacatgacaagtctggtttccctggaaaatgtcagcgtttcttttggccaacgccgcgtcctctctgatgtgagcctggaacttaaacctggaaaaattttgactttacttgggccaaatggcgcaggtaagagcacactggtacgggtagtgctcgggctggtaacacccgatgaaggggttatcaagcgcaacggaaaactgcgcatcggctatgtaccgcagaagctgtatctcgacaccacgttgccactgaccgtaaaccgttttttacgcttacgccctggtacacataaagaagatattttgcctgcactgaaacgtgtccaggccgggcacctgattaacgcaccgatgcaaaagctctctggtggcgaaacgcagcgtgtactattagcgcgagcattgttaaatcgcccgcaattattagtgctggatgaacccactcaaggcgtggatgtaaatggccaggtggcgttatatgaccttattgaccaactgcgtcgtgaactggattgtggcgttttaatggtttctcacgatctgcatctggtgatggcaaaaaccgatgaagtgctgtgcctgaatcaccacatttgttgttccggcacaccggaagttgtttccctgcatccggagtttattagtatgtttggtcctcgtggtgctgaacaactgggtatctatcgccatcatcataaccatcgtcacgatttacagggacgaattgttttgcgtcggggaaatgatcgcagttgatttaacgtcggggaaatgatcgctcatgattgaattattatttcccggttggttagccgggatcatgctcgcctgtgccgcgggtccgctgggtagctttgtagtctggcgtcgtatgtcttatttcggtgatacgctggctcatgccagtttacttggcgtcgcgtttggtttgttgctggacgtgaatccattctatgcggtgattgccgttacgctgctgctggcgggcggtctggtatggctggagaagcgtccacagctggcgatcgacacgttattagggattatggcgcacagtgccctgagcctgggcctggtggtcgtgagtctgatgtctaatattcgtgttgatttgatggcttacctgttcggtgatttgctggcagtgacgccagaagatctcatctctattgcgattggcgtggtcatcgtggtggctattttgttctggcaatggcgcaatttgctgagtatgacgataagcccggatctggcgtttgttgatggtgtgaaattacagcgagtgaaattgttgttgatgctggtgacggcattgacgattggtgtagcgatgaaatttgtcggtgcgttgattattactagcttgctgattattcctgctactactgcgcgtcgctttgcccgcacgccggaacagatggctggtgtcgctgttttggtggggatggtggcagtgactggcggtttaaccttttccgcggtttacgatacgccggcgggtccgagcgtggtgctatgtgcggcactgttatttattctcagtatgatgaaaaagcaggccagctaatctatcgctgaacacatttgtcggatgcggcgcgagcgccttatccgacctacggttcggtatctctggtagtcctggtaagacgcgaacagcgtcgcatcaggcatattgccagtgccggatgcggcgcgagcgaccaatccgacttacggcatttctggcggcgttatgccaaagtgattccacgcccgcgtcgtcgccatacgcccacgcggtgtacgctgcaaaaagccttgctgaatcaaataaggttccagcacatcctcaatggtttcacgttcttcgccaatggctgccgccaggttatccagacctacaggtccaccaaagaacttatcgattaccgccagcaacaatttgcggtccatataatcgaaaccttcagcatcgacattcaacatatccagcgcctgagcagcgatatctgcgctgatggtgccatcgtgcttcacttcggcgaaatcacgcactcgacgcagcagacggttggcaatgcgcggcgtaccgcgagcgcgacgagcaacttccagcgcgccgtcatcactcatctcaagccccataaagcgtgcgctgcgactgacgatatattgcagatccggcacctgataaaactccagacgttgcacaataccaaaacggtcgcgcaacggacttgtcaggctacctgcgcgcgtggttgcaccaatcagggtaaacggcggcaaatcaattttaatggagcgtgccgccggaccttcaccaatcatgatatccagttggtagtcttccattgccgggtacagcacttcttcaacaactgggcttagacggtggatctcatcaataaacagcacgtcatgcggttcaaggttagtgagcatcgcagccaaatcgcccgccttttccagcaccggaccagaagtcgtgcgtaaattaacgcccatttcattggcgacaatgttggcaagcgtagttttacccaaccccggaggaccaaaaatcaacaaatgatcgagggcatcgccgcgcagtttcgctgctttgatgaaaatctccatctgactacgaacctgcggctgaccaacatactcttccagtaatttggggcgaatggcgcgatctgctacatcttccggcaaagtggtaccggcagaaatcagacggtctgcttcaatcatcctttacctcataacgcggcgcgtagggcttcgcgaattaaagtttcactgctggcgtcagggcgagcgattttgctcaccatgcggcttgcttcttgtggtttatagcccagcgccaccagcgcggcaaccgcttcttgttcagcatcgtcggtcgccgggctggcaggagacgtgagtaccaggtcggcggctggcgtaaagagatcgccatgcaaacctttaaatcggtctttcatttcaacaatcaagcgttcggcggtttttttgccaatacccggcagtttcaccagtgcccccacttcttcacgctcaacggcattaacgaactgctgcgcactcattccggagaggatcgccagcgccaacttcgggccgacgccgttggttttgatcaactctttgaacaatgtgcgctcttgtttattgttaaaaccgtacagcagttgcgcgtcttcacgcaccacaaagtgggtgaaaacgatcgcttcctgacccgcttcagggagttcataaaaacaggtcatcggcatatgcacttcatagcctacgccgcccacttcaattaacaccagcgggggttgtttttcaatgatgatgcctctgagtctgcctatcacatgacgctcctgcgtaatgaatcaaagataatgctgtatgataaaaaaatgctggatagatatccagcgaaggatgaagaaaacttgcgaggtgtctcgatgaactgaaaaatggcacagtataatttattctacaggttatattggaagcaaatattttaatattacatattcagtgaagaaatgcgtaataaaaatatacattgcgcctcctgaaaaaataaattttttatgctattacgtatatttgtatctatttcaatggaatgacaacgtgaatattaattaccctgctgaatatgaaattggagatatcgtctttacatgtataggtgctgccttatttggtcaaataagtgctgcaagtaattgctggagtaatcacgtcgggatcattatcggtcataacggtgaagacttcctggttgcagaaagccgggttccccttagtaccatcaccacgctatctcgttttattaaacgtagctctaatcaacgctatgctataaagcgattagacgctgggctgacagaacgacaaaaacaacgaattgttgaacaggttccctcccggctacgcaaactttaccacaccggttttaaatacgaatctagccgccagttctgtagtaaatttgtttttgatatttataaagaagcgctatgtattccggtgggtgaaatagagacgtttggagaattgttaaatagcaatccgaatgcaaaactcactttctggaaattctggttcctgggttctattccgtgggagcgtaaaaccgtcacgccagccagtttgtggcatcatccgggtttggtgttgattcatgcggagggagtggaaacgcctcagccggaactgaccgaggcggtataacttaacgcagtcgccctctcgccaggttcagccggctttcgctcatctgcatcgcattctgactaacgtggcagtgggtgatagcaatcgccagcgcatcggcggcatccgcctgtggattagcgggcagtttcagcaaggtgcggaccatatgctgcacctggcttttttcggcactgccaatacctaccaccgtttgctttacctgacgtgccgcgtattcaaatactggcaactcctgattcaccgccgccacaatcgccacgccgcgcgcctggcccagtttcagggcactgtcagcgttctttgccataaagacttgttcaatggcgaaataatcaggctggaactgggtgatgatttccgtcacgcccgcatagatgagtttcagacgagacggtaaatcatccactttggtgtggatgcatccgctacccaggtaggacagttgcctacctacctggcggatgacgccgtagccggtcacgcggctacccggatcaatgccgagaataatagccatcacgcgtctccgttttgctgtttagcaggcctcatcagagagtcgctgcgacctcatcagagatttcaccgttatggtaaacttcctgcacgtcgtcgcaatcttccagcatatcgatcagacgcatcagtttcggtgcggtttctgcatccatatcagctttggtagacgggatcatggaaacttccgcgctgtctgctttcagacctgccgcttccagagcgtcgcgcactttacccatttcttcccatgcagtgtagacatcaatcgcgccgtcatcataggtcacaacgtcttcagcacctgcttccagtgctgcttccatgatggtgtcttcatcgcctttctcgaaggagatcacgccttttttgctgaacagataggcaacggaaccatcagtaccgaggttaccgccacatttgctaaatgcatgacgcacttcagcaacggtacggttgcggttgtcagacagacattcaatcatgattgccgtgccgccaggaccgtaaccttcgtagatgatggtttccatgtttgcatcatcatcaccgcccacaccacgtgcaattgcgcggttcagtgtgtcacgggtcatgttgttagacagtgctttatccaccgccgcacgcagacgcgggttagcgtccggatcgccaccgcccagcttagccgcggttaccagctcacgaatgattttagtgaagattttaccgcgcttagcatcctgcgcagctttacgatgtctggtgttggcccatttactatgacctgccataaaaatatctccagatagccctgcctgttcaggcagcgttaattacaaactgttcaatcgcctgccggttgctccaggacttagtgagcgccgccgcagcaggcgcatcaagccacttgtaagccagatgttcagtgaaaacgatctgccgctcgtgcggaagcgcaagacagaaccaactttccgtattacgcgtcacgcccggcgcatagcgatgacgtaaatgactaaaaatttcaaactctaccgtgcgctgacagtcaattaaggtcagttgttcagcgacaacatcaatggtgacctcttcctttacttcgcgcatggcagcttgcggcgcggtttcaccctcttccacgctgccggttacgctctgccagaaatcgggatcgtcacgccgctgcaacatcagcacccgtttcgtatcttgtgcgtagatgaccactaagatgctaacgggacgcttatacactttatccttcacgctgcctcttcgttgactgccttcgctcatcccattcacatagttatctatgctcatgggagttcactcagttgccgcctcgatgcaacgcgaatgatttcgtgtatttgagtcatatcagttattctcagccttcttcacaacctgaatgctcagctcagccagtgcagtcgggttagcaaagctcggtgcttcagtcatcagacacgctgccgccgtggttttcgggaaggcgataacgtcacggatattgtcggtgccggtcagcagcatggtcagacggtcaagaccgaatgccagacctgcgtgcggcggagtaccgtatttcagagcgtcgagcaggaagccgaatttctcgcgctgttcctcttcgttgatacccagaataccaaacaccgtctgctgcatatcaccattatggatacgtacactaccaccgcccacttcgtaaccattgatgaccatatcgtaagcgttcgccaccgcattttccggtgcagctttcagttctgcagccgtcatatctttcggactggtgaacggatggtgcattgccgtcaggccgccttcaccgtcgtcttcaaacatcgggaagtcgataacccacagcggtgcccatttgctttcgtcggtcagaccaaggtctttacccactttcaggcgcagtgcacccatcgcgtcggcaacaattttcttgttgtcggcaccgaagaaaatcatatcgccatcttgcgcggcagtacgatccaggatgtcttcgatgatttctgcattaaggaacttcgctaccgggctgttgataccttccagacctttcgcgcgttcgttaactttgatgtaagccagacctttcgcgccgtagattttaacgaagttaccgtattcgtcgatctgcttacgggtcaggcttgcgccgcccggaacgcgcagagccgctacgcgacctttcggatcgttcgccggacctgcaaatacagcaaactcaacagatttcagcagatcagcaacgtcagtcagttccatcgggttacgcagatccggtttatcagaaccataacggcgttctgcttccgcaaaggtcattaccgggaaatcgcccagatccacacccttcacttccagccacagatgacgcaccagcgcttccatcacttcacgcacttgcggcgcggtcatgaaagaagtttccacatcgatctgagtaaattcaggctgacggtcagcacgcaggtcttcgtcacggaagcatttaacgatctgatagtaacggtcaaaaccggacatcatcagcagctgtttgaacaactgcggggattgcggcagtgcgtagaatttacctttgtgcacacgagaaggcaccaggtagtcacgcgcgccttccggcgtggctttggtcagcatcggagtttcgatgtcgaggaagccgtggtcatccataaaacggcgcaccaggctggtgattttagcgcgggttttcaggcgctgagccatttccggacgacgcaggtcgaggtagcggtatttcagacgcgcttcttcggtgttgacgtggttagagtcaagcggcagaacatctgcgcggttgatgatagtcaggctggacgccagcacttcgatttcgccggtcgccatatcgcggttaatatttttttcgtcacgcgcacgtacggtgcccgtgacctgaatgcagaactcattacgcagttcagaggccagctttaacgcgtccgcacgatccggatcgaaaaatacctgcacgataccttcgcggtcgcgcatatcgatgaagatcaggctaccaagatcacgacgacggttgacccaaccacacagagtcacctgctgccccacgtgggacaaacggagctgtccacaatattctgtacgcatgagatatcccttaacttagctgccggcggatgccccctgctgcgcaggtgaccaagtcgcagcgttagctgtatgtcacaactgaatgaaaaaaggcggctattatactggaaattctgccgcaccgtaagagcctggcccgcgctggaacgcctcgttaccactttatatcgggcctgaaatcagactctacgccagtttgctataaaggtgttgcccgaactcataaaaattaacaaaatttgtcgttccgccatcggctaatcgcattaaggtgtgaggcacgattttgttttttcaggagtcattatgcttgaacttaatgctaaaaccactgcgctggtggtgatcgatttacaagaaggcatcttaccttttgccggtggtccacatactgccgatgaggtagttaatcgcgccgggaagctggcggcgaaatttcgcgccagcggtcagcccgtgtttctggtgcgcgttggctggtctgccgattacgctgaagcattaaaacagccggtcgatgcgcccagtccggctaaagtgttgcccgaaaattggtggcaacatcctgctgcattaggtgcaaccgacagcgatatcgaaatcatcaaacgtcaatggggtgcgttttacggtacggatctggagttgcaattacgccgccgaggtatcgatacaatagtgttatgtgggatcagcaccaatatcggtgttgaatccaccgcccgcaatgcctgggaacttggctttaatctggtgattgccgaagacgcctgtagtgccgccagcgccgagcagcacaataacagtatcaaccatatctacccgcgcatcgcccgtgtgcgtagcgtggaagagatcctcaacgcgttatgatttacatcggtctaccgcaatggagccatcctaaatgggtgcggttggggatcaccagccttgaagagtatgcccgccactttaactgcgtggagggcaacaccacgctttacgccctgccgaaacccgaggttgtcctgcgctggcgtgagcagaccacagatgacttccgcttctgttttaagtttccggcgaccattagccatcaggcagcattacggcattgcgatgatttagtgactgaatttttgacccgcatgagtccgttggctccgcgcattgggcaatactggctgcaactgcctgccacattcggcccacgggagctgcctgcgctttggcattttctcgattctcttcctggcgaatttaattatggcgtggaagtccgccatccacagtttttcgccaaaggagaagaggaacaaacgcttaatcgcggtttacatcagcgcggcgttaatcgggtgattttagacagccgcccggttcatgcagcacgtccacacagtgaagctattcgcgacgctcaacgaaaaaaacctaaagttccggtacatgctgtactgacggcgacaaatccgctgatccgttttatcggtagtgatgatatgacgcaaaaccgggaattatttcaggtctggttacaaaaattagcgcagtggcatcagaccactacgccttatctttttttacatacgccagacattgcccaggcaccggaactggtacataccctgtgggaagacttacgtaaaacgcttccagagatcggagcagttccggctattccacagcaatcttctcttttctgaatttgccacctatcatagacaggtgccatcggccattttaaagggagtttgtatggtaagcgcgctgtacgccgttttaagtgcgttgttattaatgaagttctcttttgatgtcgttcgcctgcgaatgcagtaccgcgttgcctatggcgacggcggttttagcgaactgcaaagcgctattcgcattcatggtaacgcggtggaatatattcccatcgcgattgtgctgatgctgtttatggaaatgaatggcgcagaaacctggatggtgcatatttgcggcatcgttttgcttgctggtcgtctgatgcattattacggttttcatcaccgtctgttccgctggcgacgttccggcatgagcgccacctggtgtgcgctgttgctgatggtgctggcgaatctttggtatatgccctgggagttggttttctccctgcgttaacgcacaatacgccactttctttttcccggatttttacgttatgtctcaccgcgacacgctattttctgcccctatcgccagactgggcgactggacctttgatgaacgggtagctgaagtcttcccggatatgatccagcgttccgtacccggctattccaatattatttccatgattggtatgttagccgagcgcttcgttcaacctggtacgcaggtttacgatctgggttgttctctgggcgcggcgacgctcagcgtgcgtcgcaacattcatcatgataattgcaaaattattgccatcgacaactccccggcgatgattgaacgctgccgtcgtcatattgacgcctataaagcccctacgccagtagacgtcattgaaggtgatattcgcgatatcgccattgaaaacgcaagcatggtggtgctgaattttaccctgcaattcctggaaccttccgagcgccaggcgttactggataaaatttatcaagggctgaaccccggcggcgcgctggtgcttagcgaaaaattcagtttcgaagatgccaaagttggtgaactgttgttcaacatgcaccacgactttaaacgtgccaacggttacagcgaactggagatcagccagaagcgcagcatgctggaaaacgtgatgctgaccgattccgtggaaacccataaagcacgcctgcataacgccggttttgagcatagtgagctgtggttccagtgctttaactttggtagtctggtggcattaaaagcagaggacgctgcatgatcgactttggtaacttttattctctgattgccaaaaatcatcttagtcactggctcgaaacgctgcccgcgcagattgctaactggcagcgcgagcagcagcacgggttgtttaagcagtggagtaatgcggtggagtttctacctgaaattaaaccgtatcgtcttgatttattgcatagcgttacggcagaaagcgaagagccactgagcgcagggcaaattaaacgcattgaaacgctgatgcgcaacctgatgccgtggcgcaaagggccgttcagtctgtatggcgtcaacatcgataccgaatggcgttccgactggaaatgggatcgtgttctgccccatctttctgatttaaccggacgcaccattctggatgtcggctgcggcagcggttatcacatgtggcgcatgattggcgcaggcgcgcacctcgcggtggggatcgaccctacgcaactgtttctgtgccagtttgaagcggtgcgtaaactactgggtaatgatcagcgcgcgcatttgttaccgttaggtattgaacaacttccggcactgaaagcctttgataccgtctttagcatgggcgtgctttaccatcgccgtagtccgctggagcatctatggcagttgaaagatcaactggtcaatgaaggtgaactggtgctggaaacgctggttattgatggtgatgagaacacggtgctggtaccaggcgatcgttacgcgcaaatgcgtaatgtctatttcatcccttccgcgctggcgctgaaaaactggctgaagaagtgtggttttgtagatatccgcattgcggatgtgagcgttaccaccacagaagagcagcgacgcaccgaatggatggttaccgaaagcctggccgatttcctcgacccacatgatccgggtaaaacggtggaaggttatccggcacctaaacgcgcggtgctgattgcgcgcaagccgtaaaggtctggtattactgccggatgcggcgtgaacgccttatccggcctacaaaaccttgctaattcaatatattgcagggactatgtaggcctgataagcatagcgcatcaggcagctttacgtttgcataacctcagcgcccgtttccgggcgctattcacgtcttacgcctgaacagctggctgatcaaacgccgttaacttcggtgcattgcccgtatatttttcgatatacaccaacgcactgttaccggcacaggcatttgccagctggctgctggggatatccgccgttaacacgttcgcactgccgtttttacacaagccattttccagatctggccatgcaccttcatgcacgcataccacgccttttttgatcccgtcagtcaccaccgcgcctgtcaaaatctgaccacgtttgttccagacacgcaccagatcgccattcgcaataccaaagcgtgcagcatcttcggtgtgaatagtgattggttcacgatcggcgatcgcatattttttacgcagttccgcatagttaagctgactgtgtaaacggtgtgccggatgtgcggtcagaagctgtaactgcttctcgtcggcggtacctttccattcatcaggagccagccaggttgggtgtgccgggcaatccttatagccaaatttttccaacgttttactatagatttcaattttgccgcttggcgtacccagcgcatttttcaccggatcggcgcggaaatcaccataacgaacgtactgttcgttcttctcgctgtggcgcatttcgatcagtttattttgctgccagaaggcattaaacattggcatagtgacgcgttgcgcacgggcacctttctgagcggcatcatagaaaaatttcagccacgccatttcatctttaccttcggtatagatctcttttccgccaggtttgagtaattccgcaagatcggcaaacacgtcaaaatcgttacgcgcttcaaattgcggagcaacagcctgcttcatcggcacaatatgctggttgctgtaatcaccggtcatcgtcaagtcattgcgctcaaagcttgtggtgatcggtaatacgatatctgcgtgtttggctgctgcggtccagtagcattcagaaacgacgatcatctccggtttctgccatgctttaatcagacgattagtatcctggtgatgggtaaagttaccgccacccgcccaccagatcattttgatattcggatacgtttgttctttaccgttatgctgatatttgccgccaggattttccagcgcatcgacgatacgggcaacaggaatcgccgtcattccgccatcatcagcggcctcgctggcatgtccggcaatcgccgcagacatttccggcagcacgccgccaacacgcgtcgggttgccaccgttggagtaatgataagagaaaccaaaaccgccgcccggtgtaccaatctgccctaacatcgccgccagcgtcaccagcatccagtgtttctgttcaccatattgctggcgctgaattccccagcctgccatcagcattgtgcgattcgccgccatcagttcagcgagtttgactatctgcgcttccggtacgccagtaatttccgccgcccagaccgcgctcttcggcgtattatcgctcttacctgtcagatactcttcaaactgcggatacccggtagtgtatttttcaaggaacactttatcgtgtttgccttgtgtcatcagggtatgcgcaatccctaacatcagtgccacgtcggtgcccatattcggcgcgatccaggtggcattatcgtcaaagaattcgatggtttcggagcggataggatcaatggcaatcactggtttgccagattttttcagctgatggaagtattccagcccttgctcatcggtactgctccaggcaatttttaaggtattcagcgggttcattccccacagcaccacaacctggctgttttccagaatcagcggccaggaggtctgctgttcatacacctctacagaaccgaccacatgcggcatgatcacctgtgctgccccggtactataatcgccgctatgcccggaataaccgcccgccaggttcatataacgttgcagtaaggtttgcgctttatgcaacacgccagaagagcgccagccgtaagatccggcaaaaatggcgcttggtccgttagctttacgaatacgatcatgttgctcatgaatcagttttaatgcctgttcccagctcacctgtacataggtatcttcgccacgacctttcgccggttgcagtggattatcgagatagctttttctcaccatcggatgctgaatacgcgccgtggtgtgtacctgatccgccgccgtagactgtaaggaattcggtatggttttcgccagcgcgcctgtactagaaacaatcttgccgtccttcacttctacgttcatcgctccccaacgtcccgcggtgaggattttaccgcccttctcttctgcccatgcggggagcggtgctgcgcttgtcaccaccagcgctccagcggcaataccgctgtgtttaataaattcacgtcttgttaatgtcataacttcctccctgatcaacgaggatcactgtttctcggtaatatctttggcgttgtactggaaataccgcgttaaaatgtccagttcgttttcgctcatgctggttcgtgcccccattcctttggcaatggacggccacgcattgacggtgtaatggtcggcggcaataggggcatgacaaccagcgcaataggtatcgtcaagtttttcagcgtattgccatagcggtttacggtccgctaatgcgggatcggtaagcgcaccctgtaaagacgcctgacgccattgattgccgtattcgtcagcctgccattccccgtttacagtgagcgccttgataccttcttcacttaatgtggctagcgccagccgttgacctgccgccaggtagagcgtgttttcactgccctgcatttgataaccctgcaacagaacgatcggctgtttgccactggcatcaacgacggtgagatcggttccaggattcacggtagccagctcgcctatgtgagaagttttgaaaggataaatatgtgcgccattagtaacactagtagcggcctgactttccagctcatgcgccgcgttgtcatccatttttatttctggcggaaaatgggcaatgcctttatgacaatcgatacaggtttcgctgtccttttgtgctttgttatgcattttctgcgcagattcactttggctggcaatatccatggcatcaaaagaatggcaactacggcacgttgcagagtcagtggcttttaattctttccatactgtttcggccatttcctggcgatgagcttcgaacttatcgtcactgtctattttgccgctaacaaattcatgataaatatctttagatgcctttaatttagcaaataaataatccatcccactctttggaatatggcaatcggcacattccgcacgtatccctttctggttgctaaagtggacagttccctgatattcctcaaaaggtttactcatgctgtggcaggaaaggcaaaatgctgtatcgctcgttttatgtaagactttttgcgccagcaataacccgccgccaccaaccacaaccgctatcagcaaaaacaataacccaatgcgttttttccctcgcatagattcctctaattaaattactggacaccgaaatcattgtataattaaatatacaacgaattaaccgcttgcataattaggcacaacactgcctgaaacaatcgataaagaatatgatttattacaatgtaatcattaattgctaaggaataacccagttgctatttagaatatatatttatcagttttagtaatttaaatcccataattaatgtgaatatatacaatatttttagcacaacgctatgcgcactgtcacccgctcaacagatcacggttatcgttcgttttttatactgttcagggataaaaaaaggcccctgttgaaattgcaggggcctggtacgagcaagcatcatattgggcgacatgatgcaacggtaaaaatcatttggcctgatggcgttcaatgattcctttcatttcagcaaccgccgccccgtctacgatataacggctatactcgtccgcgtgttcatcactactcatggacaatccttgattacgataacgcatcggactggcttgccacgctcccgcggagctatggacttccagcactccggcatcgaggaagtggtgcaggttttctgcacggactcctgctccggccataatgattggagcatcacgatgggcaataagttccataattttacttaaaccttgcagtgcgtcacttttttgcccacttgtcagtacccgggcaatgcccaattccgcaagattattgagtgtatataaagggttagcgcacatatcgaaggcgcgatgaaaagtcactgccagcggaccggcagcagccattattttttccattcgtggcatatcgacattcccgtcaacatcgagaacgcccgtcaccagtccaggaaaacctaattcgcggaccgtgcgcacatcctcaagaatggcggcaaactcaccgtcgctgtagcaaaaatcaccaccgcgtgggcgaattatcggatgcacagggatcgtcacccgctggcgcacggatttcagtacacccaagctcggcgttaagcccccctcttttggggctgcgcataattcaactctgtctgcgccgttttgctgcgccgttagtgcacattccatgctgtaacagcaaatttccagtaatgccatttttactccttaattacgcgctctgctcgctggcaacgatctcttcaatggaccacggatgaaacttaatagttgttttgccatcggtgaccgccagcgtcggattcggtaatcgctcatgctcaccttttgggctactggttttcacactgatccccggtaggctgagtccttcatcagaaagcaatgccagcgcacgggcattcagcgtttctggatcacccggcagaacgatttcaatatgttcccaaccttcgtgtgggtaacgtttttccccgggccacggtagctccacaatagaaaactgccagtgcgcaacctgtaccggttcatgcaatttaaacagacaaatcggtctgccattgatcatattttcactcaaaagctcgccacactgttcaaacccgcgacgccagcgttcagcagtggcgttttgatggcaacgcaaagaaatgtgatcggcagtcagcggagtgatattcaaccccagacggcgggaaagttcatctaatgcgtggataaatcgcggtaaatcgcttgcaatatcctgcagctcgtcgatagattgccagttcgccataatcactcttcgtctttcagtaaaagcgttaatttaccctgttgccctgtgccaaccaaccgctgatttcacgccgcttctgatgcaatagtgaaaacggcaatacgccacgcgcacgttgctgacgaaaacagccatttgcagtatactcccgccctaatttctttaactggtgcgggcaatttttgctcgcttcatcaatgtaaggtattccggtgaatattcaggctcttctcagtgaaaaagtccgtcaggccatgattgcggcaggcgcgcctgcggattgcgaaccgcaggttcgtcagagtgcaaaagttcagttcggcgactatcaggctaacggcatgatggcagttgctaaaaaactgggtatggcaccgcgacaattagcagagcaggtgctgactcatctggatcttaacggtatcgccagcaaagttgagatcgccggtccaggctttatcaacattttccttgatccggcattcctggctgaacatgttcagcaggcgctggcgtccgatcgtctcggtgttgctacgccagaaaaacagaccattgtggttgactactctgcgccaaacgtggcgaaagagatgcatgtcggtcacctgcgctctaccattattggtgacgcagcagtgcgtactctggagttcctcggtcacaaagtgattcgcgcaaaccacgtcggcgactggggcactcagttcggtatgctgattgcatggctggaaaagcagcagcaggaaaacgccggtgaaatggagctggctgaccttgaaggtttctaccgcgatgcgaaaaagcattacgatgaagatgaagagttcgccgagcgcgcacgtaactacgtggtaaaactgcaaagcggtgacgaatatttccgcgagatgtggcgcaaactggtcgacatcaccatgacgcagaaccagatcacctacgatcgtctcaacgtgacgctgacccgtgatgacgtgatgggcgaaagcctctacaacccgatgctgccaggaattgtggcggatctcaaagccaaaggtctggcagtagaaagcgaaggggcgaccgtcgtattccttgatgagtttaaaaacaaggaaggcgaaccgatgggcgtgatcattcagaagaaagatggcggctatctctacaccaccactgatatcgcctgtgcgaaatatcgttatgaaacactgcatgccgatcgcgtgctgtattacatcgactcccgtcagcatcaacacctgatgcaggcatgggcgatcgtccgtaaagcaggctatgtaccggaatccgtaccgctggaacaccacatgttcggcatgatgctgggtaaagacggcaaaccgttcaaaacccgcgcgggtggtacagtgaaactggccgatctgctggatgaagccctggaacgtgcacgccgtctggtggcagaaaagaacccggatatgccagccgacgagctggaaaaactggctaacgcggttggtattggtgcggtgaaatatgcggatctctccaaaaaccgcaccacggactacatcttcgactgggacaacatgctggcgtttgagggtaataccgcgccatacatgcagtatgcatacacgcgtgtattgtccgtgttccgtaaagcagaaattgacgaagagcaactggctgcagctccggttatcatccgtgaagatcgtgaagcgcaactggcagctcgcctgctgcagtttgaagaaaccctcaccgtggttgcccgtgaaggcacgccgcatgtaatgtgtgcttacctgtacgatctggccggtctgttctctggcttctacgagcactgcccgatcctcagcgcagaaaacgaagaagtgcgtaacagccgtctaaaactggcacaactgacggcgaagacgctgaagctgggtctggatacgctgggtattgagactgtagagcgtatgtaatcgatttttcgtgagagtgaagcctgatcagggttagccgatcaggcttttttattgccatctaaatgtattctgaaaatggacatgccattgttttctcactgttggataagaggccagaagcgtaatatccggccccagggaaacgataacggttgaatttaaggaataccgcagtgtttaaatttcttgtattaacattaggcattatctcttgccaggcttacgcagaagatacggttatagtaaacgaccatgacattagtgccatcaaagattgttggcaaaaaaatagtgatgatgatactgacgttaacgtgatcaaaagttgcctgcgacaagaatacaatctcgtcgatgcgcaattaaataaagcctatggtgaagcttatcgttatatagaacaagtgccacgcacaggtgtaaaaaaacctgataccgaacaacttaacttgcttaaaaaaagtcagcgagcctggctggattttagggacaaagaatgtgaattaatccttagtaatgaggacgttcaggatttaagtgacccttattctgaaagtgaatggctcagttgtatgatcatacagaccaatacgcgaactcgccagttgcagctataccgtaactctgaagatttttatccaagccctttgacaagaggataattcacatctttttggcatgttttgttgcaagctattcctgataaataattgcaacaagacatcgagcctttttcactgagttattaaacatactcgcgagcgcgtcgctacgctagcaagcaaaaatgaaacaggaataatcgaaatgggatgttgcgcacagtcaaaataactcaccgtaaataatcatctgctataaataatcactttcatgcaataccagataagctatttttaaacagacacttaccgcacaacaaactaattaaatacaaagaaaggcaacaatcaacttaatgttaatgaaatgttttacatatattaaccacttgtttaatgcggagaatcagtacactattttcttataattacatttgaaattatatgatcaccgggagtgattgattaattatctttactaataatcagactaatatttacctgtttgaccgagttgggattgcgtcgtttctccattaggagtaaagctttaatgtcacctgaagttcacagaataaggaacaggttatgagctatagcaatattcttgtcgctgttgcggttacaccggaaagtcagcaactgctggcaaaagcggtatctatcgccaggccagtaaagggacacatcagtttaattactctcgcttccgacccggaaatgtacaatcaattagctgcgccgatgcttgaagatttacgcagcgtgatgcatgaagaaacgcaaagctttcttgataagttaattcaggatgcggggtatcccgttgacaagacgtttattgcctacggtgagttaagcgaacatattctggaagtatgtcacaagcatcatttcgatttggtgatttgcggtaatcacaatcacagtttctttagccgagcatcctgcagcgcgaaaagagttattgccagtagtgaggtcgatgtgctgttagttccacttacgggagattaaccgctcttacgcaagctttggaaaggtagcaactttatcgcgctgctggctttccgcgcttcgcggaactatctgctttaggtcgctaatgaagcactcctgccagtggttaatatcgtttttcacgataacgtccagcatttctgcatgacgggaaatacgttccgccaggctcatagtcaatgcacgatccagcgcagctgcaacttcgtcacgatcgtaggggttaacaattaacgcgctcgttaactcgtttgccgctcccgcaaattggctaagaacaagaacgcccggattggctgggtcctgagcagcaacatactcttttgctaccaggttcatcccgtcacgcagtggcgtcactaagcccacgtcagagtagcggaatattttcatcagtaatttacggtcaaaatgctgattcaaataataaagcggcgtccagcctaattgcccgtatttaccattaattcgtccagcttcattttcgagctgatgacgaatatcctgataggcttgcacatcaccacggctcgttggtgcaatctgggtataacgaattttaccatgatgctgcggatatttttccagcaacgcttcataggcgagaaaacgctctggcaaacctttggaataatccagccgttcgacagaaaagatattttgtacgtttttcagttccgctttaagttgcgccagttttggcggcagtggcccggcagcctgtttggctatttctttcggttcaatgccgatcgggtagacttctgttcgaaatgctttgccccaggctgtatggctttttgcgctacgtgtcgtgacgcgggtcaggttagaaagacaatccaggaacgccagacgatcgttttctgtctggaaacccagcaaatcataatcacaaagctgttcaagcaaggtgtcatatgtcggcagcgcgttgaagatttccggtgtcgggaaaggaatatgcagaaagaaaccaatgcgattattcactccccgtttgcgtaattcatgcgcaaatggcaacaggtgataatcgtggatccagataatgtcatcgtcttgcaacagcggcagtaatttatctgccagcaacgcatttacgcgtagatagccgtcccaggcaggacgctgaaattgcaccagatcgagccgataatgaaaagcgggccagagaacggcattggagaattggttgtagtattcgtcaaggtcctgttcgctgaggttaaaagaggcccacgtaatgttaccttttttcaccttttttagcggctgatcctcattccctgtttcaccactccagccaaaccacagtccgcctgcggctttcagtgcccccagtatgccaacggcaaggccaccggcactggcggcgtgctcgtctggtggtgcaatccggttagatactacgactaaacgactcatagtcatcactcctgttatttttacttagatactacgactaaagctctcatagtcatcactcctgttattttctcttttttgttgtaatgcggtggttatcatttcaagccagctccagacatccggcacacccgccagtcgccaacttgcctgagttgcacctgtgccaatttttacactcattccgcccagtcggttaacgactgcgaagccagattcatcggttaaatcatcgcccagaaatacgggcgttcgcccgataaagggagcttcctgcataaaagctgcaattgcctcacctttactggtacctctcggtttgatctcgacaacacactttccctgctgtaacgccatttgtggccagatctgagtaatacgttgcgctaatgtcattaatgcgtcttcatgctgcggagcctgacgataatgcagcgcaaaagccatccctttcgcctccagctccgcgccgggatactgagcgatgactgtatgcagttgcacgctaatatcacgcgcaatcgcatccggcagatgaacgatatgtgttttaccattgatgtcacggcgctccgccccatgcacgcccgctaacgggaagcgataaggttttgccagtgcgtcaagctccaccatactgcgcccacttatcaatgccaatgcaccatcacttgcggttgccagtagctgtagtccttgcagaatattgtcaggcacgacgacctgatcgggatgcggtttgatttccgccagcgttccatcaagatcaaaaaaccaggcatatttcgcggatagttcaggggtttcggttaacggttctgtcacccggttctcctccttctcttttcttattgtgttgcgcagaacgcgctttacagacatgtaagtatagacagtgtgacgggggtcgccatttgcaacgaagaacagccaaccgttatggcggttggctatggtgggaaaaaacgctaaattgttgcagaaaaaagcatcagacagtgcgtttcgctttttgcttgtaacggtcgaagatcaccgctgccagcaggattaagccgcgaaccacgtactgcgcgaaaggagaaatattaagcaggttcatggcgttttccacggtgcctaaaattaagatacccgccaccacataactgatttttccgatgccacctttcagagaaacgccacctaaaacgcaggcggagataacaatcagctcataaccaatgctcgtcattggctgcccactggtcatacgactagccagaataattccggctatcgcacttaccaggccactgagaacaaagataataattttggtgcgaacaaccggtacacccgccagacgcgcggcctcttcgttcccgccaatcgccagggtgttacgaccaaaggtggttttattcagcagcaaaccaaagataatcagacacgcgacggtgagccagattggcgcaggcagaccgaaccagttggcgtaaccaagggcaaagaagctttcatcttcgataccgaccgctttaccgtcactaatgatgtacgccagacctcgaacaatctgcatcgttgccaatgtcgtgatcagagcatttattttcagtttggcgataacaaagccattgaccaggccacagagaacgcccagcaacaaccccgctgccacgccaatccacaggctttcagtcaggttaataaccaccgccgtggtgacacccgcacaggcaattacggaggcgacagaaaggtcaaagtcaccggaagcgaggcagaacaacatgccacaagccaccatcccgctcatggaaattgccaggcccaaccctttcatattaatgaaggtggcaaaatttgggacaaaaatggcacaggcgataaagagcaccgcaaacaccaccagcatgccgtactgatcccagatacgcccgaagctgaaactgctcttaggtgcgccagacccgcttgtagaaacagaagacatcatactctccttactcaggcaacagcctggctgactttaggcatcgcaaggctcagtgcctgacgctcatctgcctgctcgtgtaacaattcaccggcgatttcaccttcccgcatcaccacaatccggtcggcaacgccgaggacttcaggtaagtcgctggaggcaaacagcaccgccacgccctgcgccgccagcgcataaattacgttatatatttcgtgcttagcgccaacatcaatgccgcgcgtaggttcatccagcaaaatgaccttcatctcttcgcttaaccagcggcccagaatggctttttgctgatttccgccactgagattcatgatcagttgctccgcgcccggcgttttgatgttgaggctacgaatgtggtgatcggcattgttttcttcccaaccgttgttgattacacaaccgccgagcacatgtttacgtctggcactgatgttgatattgtcgcgaacggagtgcacgggaataatgccttccgctttgcgatcttccgggcagagcatcatgcctgcggcaatggcgtggctcggtttacgaatatcgatcggctgttggtcgatataaacctgaccggcggtgatttgcgtcccgccaaacatgcctttcattaattcgctacgccccgcccctaccagaccaaacagcccaacaatttcaccactgcgaaccgccagacttattggcgtacgcacgcctggtgctttcacagcatcaagacgtaggcgctcctcgccataactacgcggttgccagccgtagatatcgccaatgtcgcgcccgaccatcgcctgcaccagcgcgtcgtggtcaacctgctacatatcggtaaaggttttgacataacgtccatctttaaagacagtaatggcatcgctgagggcaaatatttcttccatacggtgagaaacgtataagattacccgcccctcttttcgcagttcacgaataacgcggaaaagattgtcgatttcacgggcagagagggagctggttggctcatcaaaggcgataattttggcgttacgcgccagcgctttggcgatttcaaccatctgccactgaccaatggagagatatttcagcggcgtgtccgggtcaatatccataccaagatgtttaagttgtaaacccgcctcataattcagcaaactgcgattcacaatgccgcctttatgcggcagctggccgagatagatgttttccgcgacggtcatttccggcacgagatgcagttcctggtaaataatcgccacgcccgcgttaagtgctgcggtcgtgtcggaaaaggacatttcctgcccattaatcactacagaacccgtggttggcgcatagttgccgctgaggatttttaagagagtactttttcctgcgccattttcacccatcaacgcatgaacctgaccggcatagcagtcaaaactaatatccgtcagcgccttaacgccgggaaacgttttaccgatgccgcgaaaactgagatacggggtagactgttgcataacgtctccgtgaatcactggtcgttcacaccccctctgcatcatgcagaggggaatttttccggcaaattacttaccgcctaaaccttttttctccagttcttctttaaagttgtcacgcgtgatcagtaccacgtcggtaacttcggtaaattttggcggttcaacgtcttttgctacccagttgtaaagcatttcgctggatttatagccatgtacgtccgggcttggcagcagggaaccgtagaagccggttgcctgtgctttagacagttcgctcaccgcatccacaccgttaatgccaatgccgatgatatcggccgctttaaagccctgaccttccgtcgcgcgtacgccgcccagcacggtgctgtcgttcataccgacgatcagccaatgtttaacttccggatgttgaaccagcatactgttggcagcgtcaaatgcccccgggatgtcgttagatttggtaggtacctgataaatttgtttttccgggaatccggccgctttcagcgcatccatagatcccgtagtacggcggcgggcggtatccagttcgttggcggtaatcgccatcaccgcgctttctttgacatcccagccacgtttctgcatctctttatacagttcctggccctgacgttcgccaattttagtcgccgccatcatcaccagcggaacggtatccattggcttacctttggcgttaacaaactggtcatccacggcaatgactttcatatcgtagccacgcgctttcgcgacgatggcagagccgagtttggggtccggagtacaaataacgaaaccttttgcgccactggcagccaggctgtcgatcgcgttcaatgttttttcgccatccggcacggcaatcttaataacctcaaaccctaaatccttcccggctttatcggcaaacttccattcggtctggaaccacggctcttccggttgcttcaccagaaaaccgagcttcaggttctccgccatagcggattgactcataacggctgccagaccaatggctgccagggctttagtaaatttgtgcatggttctctccagctttagtgtcgttttgtgtagggcaaaaacgaatgacattcgttaaattaatcggaaaacaaagcattaccttttaactaaaagataagtgactgtgttgacatagttttagcgagaaattaattctccataggagagcaatatcacatcgcagaattacagtgagaacgtgcataaatttagcgggaaaagacataagggaaagccaatttgtcagacaaattgtcgaatgcacagcagattaatccataagattagcctggaaatccttgttgtctttggtacccatgcgggatgtcttctttttaaccagtcaataggccgcattacctggcgttgagtttttgaaatggtgtaataaccgcaactcaaagatgtggaaaatgcacgtcattcatttcgtcattaattatcactgtgctcattaattaacagaacacgtataatgagagccatctcgcaaaaatgaaaaaacgttttataaaatcatcacttcatcatgaattcaaattcattgattaatatcaacaagatacaaaaagcactatcattaaaattcattgcagttacattgatttcatcaatgaaatgtaaaaatatataaacttgatgatttaagcattttcttatacccgttcagacgttattcttatttcagatcatcgtcagaattgactccacgatcacatttcggaccggcagaaaggaattattctgcaaacagtaattatggtgttttgatttatcttgcacctctccacttctggatataaggatattaggtatggcaaccgctggaatgcttctcaaactcaactctcaaatgaaccgcgagttttacgcatccaatctctaccttcacctgagtaactggtgttctgaacagagtctgaacggcaccgccactttccttcgcgcccaggcacagagtaatgtgacccaaatgatgcgcatgtttaactttatgaagagtgtcggcgctacccccatcgttaaagccattgatgttcccggtgaaaaactgaactctctggaagaactgttccaaaaaacgatggaagaatacgagcaacgttctagtacgttggcacagttagccgatgaagcgaaagaactgaatgatgatagtaccgtcaatttcctgcgcgatctggaaaaagaacagcagcatgatggtctgttgctgcaaaccattcttgatgaagtgcgcagtgcgaaacttgcgggtatgtgccctgtgcagaccgaccaacatgttctgaatgtcgtgagtcaccagctgcattgatcatcatcggcgctaatgcattgcgccgatgaaggttttgagaaaccgctgcctcatctgtttgaagcagcggtttttttaatgggattcaccctgtggggtaaacttgagttcaataagcgcgatggctttttggattgcccgcatggtgaccgggtctgcggcggcgggatggttagtaaagtcgatattcttcagctgactggacattttttcacgaacttcaacgggcgcgattacatcgagaacatccagaatttgtttgataaccaactggcaagcaaccacatcagaaaccaattcctgatcggcattcagcggctgggacatcgtaaactcctgatagcattttgaaagccgttatagtagcgacttcacatcttcagcgatagtcacatccaccgtcatcaggacacaaaaaaacctgccggagcaggttttttgttatcggaacatattgcctggcggtacgtctttgaacgtcttgcaatagttattgaacatacttttcaggattttgcgcagtttcatcgcggcactccgaccatttgttatacaggtgttattgtctttgcgcttataatatgacaaccatcacaaaaatcaatctttatgtgatacaaatcacataaatacccctttaatgttataaaaatgataatcaaaaaacagcccccctatttctgacacctacagatggcaagaaatagcgcctgccaggcgtcttttccggccattgtcgcagcactgtaacgcgtaaaatagtgctttctcttactcttctggctggaccatgagacttctgattctgactcttagtttaataacgctggcggggtgtacggttactcgccaagcccatgtgagcgaagttgacgcggcaacaggtattgtacggttagtttatgaccaggcttttttgcagcatgcccataccgatcgttatgtcagtcgcgggatcgccgatcgcgcatgccagcaggaaggctatacccacgcggtcccctttggtcagccagtaggcaactgtagcctttttgcgggttccttatgtttgaatacggaattcactttgagttatcagtgccatcattccgccttccctgtctttctctaaatattttaatcagcgaggggatcttcgctgattaaagaaatagcggtaatgcgttttattcccattcgtatttttaataattgaagtttatattttaccttttgcaaataataaaataacaaattatagtgacgccacagcaacaaatataacctttgtggagcactatcatgctgaaaccagaaatgattgaaaaacttaatgagcagatgaacctggaactgtactctagtctgctttatcagcaaatgagcgcctggtgcagctatcataccttcgaaggtgctgccgcgttcctgcgccgtcacgcccaggaagagatgacgcatatgcagcgtctgtttgattacctgactgataccggcaatttaccgcgtattaataccgttgaatctccgtttgctgaatattccagtcttgatgaattattccaggaaacctataaacacgaacaattaatcacccagaaaattaacgaactggctcatgctgcaatgaccaatcaggactacccaacatttaatttcctgcaatggtatgtttctgagcagcatgaagaagagaaactgttcaaaagcattattgataaattaagcctggcaggcaaaagcggcgaaggtctgtattttatcgacaaagaactctctaccctcgacacacaaaactaatgctctccggcggcaggtttactgccgccgtttcaaatcagtgacggcaaatcttactctgatcggtgctaaaaccgtctttgctaggtataaatttgccttttgctgccagaaacgctaccagctctcccgctgtcatcccttctgcgctgcaggtgtgaaaacgtgcctgttcaccaaaacgcgctttaatcgcagcttccagactggcatgcgtatattgctcgccactttcaatcatcatatttaacacttcatgaccgtgaatagagtccatcgtccctcctcaaaaaaagcctagcgtagcgattgccgcttatgaagactttgcgccagcgcaggactgaatgctttttattgtacatttatatttacaccatatgtaacgtcggtttgacgaagcagccgttatgccttaacctgcgccgcagatatcactcataaagatcgtcaggacagaagaaagcgtgaaaaacagaaccctgggaagtgtttttatcgtggcgggaaccacaattggcgcaggcatgctggcaatgccgctggctgcggccggtgttggttttagcgttacgttaatcttgttgattgggctttgggcgttgatgtgctacacggcgctattactgctggaggtgtaccagcatgttccggcagataccggtctgggcacgctggcaaaacgctatctgggacgctacggtcaatggctgacgggcttcagtatgatgttcttaatgtatgctctgactgcggcatacatcagcggtgccggtgaattgttggcctccagcatcagcgactggacaggtatttctatgagcgcaaccgctggcgtgctgttgttcacttttgttgccggtggcgtggtttgtgtcggaactagtctggtcgatttatttaaccgttttctgttcagcgccaagattatttttctggtggtaatgctggtactactgctgccgcatattcacaaagtgaatcttttaaccctgccgttgcaacaggggctggctctgtctgcaatcccggtgatttttacgagctttggttttcacggtagcgtgccgagtattgtcagctatatggatggcaacattcgtaagctacgctgggtgtttataatcggtagtgcgatccccctggtggcatatattttctggcaggtggcgacgcttggcagcattgatagtacaacctttatgggattgctggctaatcatgctggattaaacgggctgttacaggcgttacgcgaaatggtggcctctccgcatgttgagctggcagtgcatttatttgctgatttagccctcgccacgagttttctcggcgttgcgttaggcttatttgattatctggctgatttatttcagcgtagtaataccgttggtggacggttgcaaactggtgcaattacgtttctgccgccgttggcgtttgcactgttttatccacgaggatttgtgatggcgctgggttacgccggtgtggcgctggcggtactggcattgattatccctagcctgttgacctggcaaagcagaaagcacaatcctcaggcgggttaccgggtcaaaggtggtcgtccggcgctggtggtggtgtttctctgtggtattgctgtgattggcgtgcaatttttgattgcggcagggttgttaccagaagtggggtgatcagatagcctcaaattccttattgggtgccagaattaacgctgacacccaatttggcctcttaatgcaggcagcactgcttaaatttcttaccactaccgcacgggcaaggatcgttacgccccggtttctcttctgctttgatcggttgctgaacagctttttcctgcggatgcgccatccagtacgcatgtagatcaagcgccgccagtcgaatggcatctacgctctcttcaaacgcttctgggctcatcttttctacccgctcgaagttttcctcagtaccgtgcagcgcaatcgcctccagcgctggttttaagctatcgggcaacgtactccagtcagaaagtgccacgccccgcatatagccaaagcaccactcctcaacaatcgtcagctcgctgccatcaacttctcgcaagccgaataacggctcaaactgctccgggaattcgttcagacgctctgcggtatcggccatatgttgaaaagccagattcataaagcgcgtcatctctttctcactcgcccagcgcggcacatagtcagccccaccccacacggcaaccagccactgttccggttcaatctcttgcggagaactcaacaccgccgtcaataaaccgtccagctccgccacatcaaggatggcgtggtcagtgttgtatttggtcagaatatcgtccagccattccaactcactttcgtttaacggtcccgttttcatacgcttttccttgtggatctcaactcgccagcacctatcttacatgccggtccgtatcagagatactttttgagtggctttgctggtgattaaaaattaaggagggtgtaacgacaagttgcaggcacaaaaaaaccacccgaaggtggtttcacgacactgcttattgctttgattttattcttatctttcccatggtacccggagcgggacttgaacccgcacagcgcgaacgccgagggattttaaatcccttgtgtctaccgattccaccatccgggctcgggaagaaagtggaggcgcgttccggagtcgaaccggactagacggatttgcaatccgctacataaccgctttgttaacgcgccaaattcttcaggcctttcagccagacatccgcttgacgccgatgtcttttaaactggagcgggaaacgagactcgaactcgcgaccccgaccttggcaaggtcgtgctctaccaactgagctattcccgcattcatcaagcaatcagttaatcacttgattttattatcgtctggcaatcagtgccgccgttcgatgcgttgcattctacttacctggcgcgatgagtcaacgatatttttcaccacttttgatcgtttgctgaaaattacgccgaaacgatcactgatcaagcaaatctgcacgcgcagcgctcaaatattgcaacatactccacagagtcagtaccgcagccacaaagaaaagtgcaataccggcgtactcaacccaaatgttcggacgccacagcagccatgccaacgccaccatctgggcagtggttttcactttcccaatccaggagacggccacgctactgcgtttacccaactccgccatccattcgcgtagcgcagaaataataatttcacgggcgatcatcgttgccgccggtaatgtcacccaccagctgtgataatgctcggttaccagcaccatggcgatagccacgagaactttatctgccacagggtcaaggaaagcaccaaaccgggtactctggttccagcggcgtgccagaaaaccatcgaaccagtcagtcaccgccgcgacgcagaaaatgagcgcggcggcaaacgggctccaggtgacaggcagataaaagaccaatacaaagaatgggataaggatgacacggaacagtgtaagcaacgtagggatattaaattgcataatgacgggtaactatctgttgtcagtaagattacccctatgttgctacagagacatcaatgtttcaagctccagaagatcttttctgccagaccttggctaatacccggcacttttgcaatttcctcgacgctggcgttacgtaaaccttgcaaaccgcccatatatttcaacaacatttgccgacgttttggcccgacgccttcaatggtttccagggaactggtatttttgaccttcgcccgttttttacggtgcccgccaatcgcgtgatcatgactttcatcgcgaatatgctggataacatgcagcgcgggactatctggcggcaaactaaatccctcaccttccggctcaaagaacagcgtttccagtccagccttacgatctgctcctttggcaacgccaagtagcagcggatgatttttatcccaactgacatccagttcggcgaagacatttttcgcctgcgcaagctggcctttgccgccgtcgataaggatcacatccgggatcttactgtcgtcaatggctttaccataacgccgacgcagcacctgattcatcgccgcataatcatcgcccggcgtgatgcctgtaatgttatagcgccgatactccgcacgcagcgggccgttagcatcaaacaccacacaggaagcgacggtttgttcgcccatggtatggctgatgtcaaagcactccatccgcttcacttccggcaatttcaacacgctggcaagcgcggtcagtcgctggtgaacggtagattgctggctaagtttgctggttaaggccgtcgccgcattggtgcgcgcgagtttcagataacgcgccctatcgccgcgaggtttggtttgaacattaatcttgcgtcccgccagttcactaagggaatcggcgagcagcgttttatcgctaagattaaaatcgagcaggatctcacccggtaaggtgcgcatctggctgccttgtaaatagaactggcctacgaaggtttctaccacctcgctcagttccgtaccgccaggcactttcgggaaatagctgcggctgccgagcactttgccctgacgaatgaacaatacgtggacacaagccatgcccgcatcgaacgccacaccaataacgtcgaggtcgtcgccggtattggaaacgaattgtttttcggtgacgcgtcgcaccgcctgaatttggtcgcgaatacgtgcagcttcttcaaactccagattctggctggcagtttccatacgactaatgagttgcgtaagcacctgatcatctttgccagacaaaaacaggcgcacatactcgacctgctgagcgtattcttcttcactcaccagtccttcaacgcacggtcccagacagcgccctatctggtattgcagacacggacggctgcgattgcgataaacactattttcgcactggcgaatggggaaaatcttttgcagtagcgccagtgtttcacgtacggcatagccattcgggaacgggccgaaatattcacctttggcatgcttcgcaccacgatgcatcgccagacgcgggtgggtatcaccactcaggaagataaaaggataacttttatcatcgcgtagcaaaacgttgtaacgcggctgatagagtttgatgtagttgtgttccagcaacagcgcttcggtttctgtgtgagtaaccgttacatcaatttgctggatctgggcgaccagcgcttcggttttgcggctagcgaggttgctacggaaatagctggaaagccgttttttcaggtctttcgctttgccgacatagataaccgtaccaccagcatcgtacatgcgataaacgcctggctggctggttacggtttttaaaaacgcttttgcgtcaaactgatcactcactgactacttaatgtctccgcattacacagaccatggcgaattgccaggtgagtcagctcaacatcgccatgaatgtttagtttactgaacatacgatagcggtagctgttcaccgttttcggactgagattgagctgttcactgatctcattgaccttctggcccttggtgatcatcagcataatctgcaattcacgttcagacaaactggcaaatgggctttctgttttttctggttcgatctggcttaacgccatttgttgagcgatgtcagaagcaatgtaacgctgcccactatagacagaacgaatcgcactcacgacttcctgcggagccgcgcctttgctgaggtagcccgcagcaccggcctgcatgactttcgctggtaaagggttttctgtatggacggtaagcatgatgattttgacatcagctgtggaacgcgcgattttacgcgtcgcctcaagaccgccaatgcccggcatactcatgtccattagcaccacgtcaacggcatttgtccggcaccacttaacggcgtcttcaccgcagcttgcctcaccgacgacttttataccctttatatcttccagaatgcgtcgtatccctgcgcgcaccagttcgtggtcatcaacaagtagaacgttgatcaaaggaatatctccagaaatagggataacgctactgatagttagtcattcgtatattagcggtttttattgcaactttgaaacgttaaaaatggtgggtattcgatttttctctcgtttttgtcaattcgattgtccacagttatggtcacgcccgtcaccaacggcttaccggatcgtttcacagtaagccctacgatgaaatgtgacaaaaattgactttattcagcaaaaatgaaaatcagcccgctgaatatgtaacattaattaacccgaacaatacgggcaaaaaacattcatgataaaaatatttattggtcattatattaacgtattttatagcactgccgatatcacgctcaaaaaacaaccactgctatttttagcaaagcttatggtatactccgccgccttaacatttttcaccgcaaattttcattgcaacatgacgaggaaaataaatgagtacgcctgatttttctactgccgagaataatcaagaactggcaaatgaagtctcctgcctgaaagcgatgctgacgctgatgctgcaggcgatgggacaagctgacgcgggccgcgtgatgttaaagatggaaaaacagcttgcgctgatcgaagacgaaacccaggctgcagtattttccaaaacggttaagcaaattaaacaagcctaccgtcagtaatataaaaccggctgatagcgtgcctttcagccggtttttgcatctggcacgcaggacagaaaagagatcaaattaagccagtagcggccgcgtaacaggcaacctgggtcttatttggtgcattaatttttttctgcatgtttttctggtggaaattgaccgtattctcagagatactcaaaatcatcgctatctctgcacttgttttcccttccgccgtccacctcagaatttctttttcgcgcttgctgaaattcatctctggcgtcatcactatttcatcatttaaacgcatcagagccatcagactttcgcgcaccagtaactgcatttttaattgcagttcatcactaagaatgggtatttcgcgcgcgctgcaacgggaaaaggacaaaaagcccagcgcccggtttggcagcattaaatactgagtgacaccgcggcgtaaaccatgtgcgcgcgcggcttcccataacggctgtgcttcgctgaataagtcatcattccacattaaatggccctgactaaagttttcagggttcagcaccggatcaattgcgagaaagttttttgcctgataataactaacccacgcctcagggtaattggtgtaaaaagccactttaggtcgagtgaatggtaccgggtggcggacacataagctatagtaatcgtactccagctgctgagcctgaagctcaatttcatggtagacctcttctgcggtctccatcctctgaaaacgcaacagcatcgtgcgacgccagctgaaaaaatccttatcctgcatagtaaaccgcaacgcccttgagagtgagtatcatttataatgataattcaaactatcacataaataagatttatatataatttatattattcaggcaatgaattacttttgcaagccatcgcattctcttatgttattaatgagttatgctgatttgttaagcagttttatcaggcttgaaatggcgtccagccccgacaggtgaatcgtcggggctgattttttcttattattgcagcagaaacttctcgaggaactggcgggtgcgaggctgctcggttccgtaacgtttatcatgttatcctaaggattatccgaaaaataatacctacgaacatcttccaggatactcctgcagcgaaatatttgttttaagctcactcacatatcgcaacatttactttactttaagacaattccaggcaaattatacaacactttacgggatagtaagtccgcctgaaaaatcgcgagagtggcgcattaggtgacccatgttgttccgtttagtcatgatgaaatattcaggtaaggggaattatcgttacgcattgagtgagggtatgccatgagtacgattattatggatttatgtagttacacccgactaggtttaaccgggtatctgttgagtagaggggttaaaaaaagagaaatcaacgacattgaaaccgttgatgaccttgccatagcttgtgatagtcagcgccctagtgtggtgtttattaatgaggactgtttcatccacgatgcttctaacagtcagcgtatcaagctcatcattaatcaacatcccaatacgttatttatcgtttttatggcaattgccaatgttcattttgatgaatatctattggtcagaaaaaatttattgatcagttctaaaagcattaaaccggaatctctcgacgatatccttggcgatattctgaaaaaagagacaacgataaccagctttttaaatatgccgacgttaagtttgagccgaaccgaaagcagtatgttgcgaatgtggatggcaggtcagggaaccattcaaatctctgaccaaatgaatatcaaagccaagaccgttagtagccataaaggtaatattaaacgtaagatcaaaacgcataataaacaggttatctaccatgtcgtccgactgacggataatgtgactaatggtatttttgtcaacatgcgctaacacattctgactggtggtttcccaccagtcaggctgaataagattactctgctttctccacaaagataccgtcctgatgccctgcttcattaaagaaccagatgccgagcgggtagtcttccaggctaaccaggtacattgtgccttcactaaactcctcaactgccagtaccacgccaggacgacgcggaccgccatccgttttgactgttacccgatcattcaccttcatcgttttcctcctgtggctttgtgccagtgtagaacaatttcgtttttctggcagcgccaggcgcgcgcgagtgctgattttctcgacggtctatacttaagagatgccaggcggacttaacgactggcggcaacaacagagtaacggttgcgaggaaagatgatgaaaaccgcaaaagagtacagcgataccgcaaaacgtgaggtcagcgtcgatgtcgatgccctgctggcggcgatcaatgaaattagcgaaagcgaagttcatcgcagccagaacgattctgaacacgttagcgtcgatggacgtgaatatcatacatggcgtgaattggcggatgccttcgaactggatattcatgacttcagcgtctctgaagtgaatcgttgaatgcacaataaaaaaatcccgaccctgagggggtcgggatgaaacttgcttaagcaagaagcacttaaaaaattcgttacaccaggaaatctgatgtgttcatcaccttatccgcaatttttttcgctgacaagaaaatattcgccatatgaatgattaacgctacttatgaatagaaatgtgacgcacgtcaccccttggtggctctggcgtcagcgggatcgctcccgaaaaaatcatctttgataatttgtgcggttttgagaatcatcctggtaagaggagtactgcgcgactatgtttagtattcaacaaccactactggtttttagcgatcttgatggcaccctgctggacagtcatagttatgactggcaaccggcagccccctggctcacccgtttacgcgaagcaaatgttcccgtcattctctgtagcagtaaaacaagtgcggaaatgctgtacttgcaaaaaacgttggggctacaaggtttaccgctgattgccgaaaatggcgcagtgatccagcttgctgagcaatggcaggagatagacggttttccacgcatcatcagtggtattagccatggcgaaatcagcctggttttaaatacgctacgcgagaaagaacattttaaattcacgacttttgatgatgtcgacgatgcaaccatcgccgaatggacgggattaagccgtagccaggcggcgctgacgcagcttcatgaggcgagcgtaacgctaatctggcgcgacagtgacgagcgtatggcacaatttaccgctcgtctgaacgaactgggcttacagtttatgcagggtgcgcgcttctggcacgtactggatgcttctgccggaaaagatcaggctgccaactggattatcgcgacctatcaacaattgagtggcaaacgcccaaccacacttggcctgggcgatgggccaaacgatgcgcccttactggaggtaatggattacgcggtgattgtgaaagggctaaatcgtgaaggggtgcatctgcatgatgaggatccggcccgcgtctggcgaacgcagcgtgaaggaccggaaggatggcgtgaagggctggaccattttttctccgcccgttaagcgttatcgctcgcgaatacccgattacgcccagcctgtttagcgagataaagccgacggtcggccagactctggagttgttcaaaatcataatcaccggtttcctcgctgctgcttacccccaggctggcactgatgcgtatcgtcgtactcttggcgatcaacatctctttttcatttaatttcagtcgaatacgttctgcgacctccgcagcctccgtcagactcgcgcctggcagaatcacacaaaactcctcaccaccgacccgcccggcaacgtcctgcgcacgcaaggaactgctaattaatccggcagcatgagaaagaacacggtcgcccgcctgatgaccaaagcggtcattaatcgctttaaaatggtcaagatcgacctgaatgacagaaaaaggatgttggtgcgtctgacacaatttagcgagcggacgggctttttcgaacagtgcgccacggttatataaacgcgttaaggtgtcgtgccacgcctgccactgcaagctgctttgcagaacatacatgttgctaaccatccggcgaatcacataccaggagatgagtaacatggtggtaaagagcgcccacagcagggttaatgcaatgctgatactgccgaaatcgccgcgcacgccttcgcttaacgtatggacacgcaccagcacaccgtcgaaatggtccagacgttcccagctaacatagcgactgtccatacgaatgccgccccgcgtgtcatgttccattgcctgcgccagcaaggccagttcacgaggatcaaaaatattccctgttggatggtcaggattggaagaggtcaaaaatctcagcttactgtcatagagctgatactcaccatcgaggtttttatcgatggcgtttcttaaaaattgctgcatagtacgcacgggaatactcatccccagcacgccataccagtagttattactgtctaccggaacactgacggtaacctgcggttcagtattgctggcgtgttccggttggctagtgaaccagcgtaccgcgcggtgacgattttctcgttgactatggccaataaaccagggttgggtgacatagccgtaataacgcgttggaacattgcgcgtaaacaaggtcggctgcgtgctaacgtaaaatccggcacggctgacatacatcgcctgttcaaccatgctgctggagttgtgcgctagtcgcagcaagtaaccaacttccagtgcagcggtaatttcattgtcgaggctttcattttcgcgagacaggagattcccctcgctgactaatgcatcgctcacaccattaactggcagagtgcgtcgtcggttgagttcgattttccaggcgtgctcgtcgcgatgctgttcgaactcggttacagcatcacgcagagaggtgaaatccagtggcgctacgagagcttcgcgcatgccattacgtaaaaagatcagtttgtcgacgttatactgcaaatgcttatcgagcgcgttggcaacgttttccagatgattacgctggctggagatataggcatcttccagcaccaccacttcacgccaggtgagcaaggtggaaaaaagcaataccacgataaagcagagattaacgacatgaccaggccccaggcggcgtgcgagttttttcaaccagctctggttttccatttttgtctcgtgctgcaccctgacgactcccaacctgcttttttatgattctggcataacctggcgatagcgtaccgcaaaacagcgataattttataatggtggcatgataagacgcgactatcattcattgcaggcattagcacaccaggccggatgtgatccggcctgatgttaatgataccctttcacacttcttccgcagaacgactcccctcccccggaacaagctcggtttcatgaaaagcttcccgcttgaccccgtaaccgtcataccaacgacactcaaccataccgctggagtatccagtgacaatcatccgcgggccgccctctttaaccgtaacttcctcactaaccataaagctcatactcgcctccttttttcgagtgaaacttgttcaccttagttgaagatggcgaattttgcataatagccagtgcgagtattaatgtgcctgaccgcgcattttctctacggctttcactcccagcaccacgatgccgccgatgataaatccaagaatcagatttaaaacagtcggtaatatcatcgccactactgcactttgctgcccggcgaaatgttcaatggcgtgatgcagcggcgcaattccatgtaccacaatcccaccgccgacgaggaacatcgccagcgtgccgacaatgcttaacgctttcatcagccagggcgcgataatcaataaccctttacctaatgcctgcatcagcgcgctggatttttccgccagccaataccccaggtcatcaatcttaacgataacccctaccagaccgtagacgcccacggtcactaccagcgcgatgccactaagcaccagcacctgattaagcaacggcgcttcggccacaatccccagcgtgatggcgacgatttccgcagacaatataaaatcggtacgaatcgccccttttattttgtccttttcaaacttcagcggatcctgcgccgccagcttctccagacgctgctggctctgcgccggatcttctttatgtttacgcgcctccagcatatgcagcactttctctactccttcaaagcagagaaacgcgccaccaatcatcaacagaggcgtaatcgcccacgggataaacgcactgatgatcagcgccagcggcaccagaatcactttattaatcaggcttcctttcgccacgccccagaccacgggaagttcccggttggcccgcacgccactaacttgttgcgcattgaggcttaagtcatcccctaatacaccggcggttttcttcgccgccagtttgcccatcacggagatatcgtccagtagtgtggcgatatcatcgagcaacgtcagtaaactactcccggccaaaagcattccctctcatttttattgttgaagggtgtaagtatgaagcaaaaacggcagctctgatacttgcttcacaggtcaacatttttttaacaatcaagtgcaattatatctctcgccagcagaatgattttcacgtttactatgaaccacctttttatttccaccgtgagggattatgcgtttccgccagttgttaccgctttttggcgcgctgtttgcgttgtatatcatttggggcagtacctattttgtcattcggattggcgtggaaagctggcctccgttaatgatggcgggcgttcgattcctggcagccggtattttattgctggcatttttgctactgcgcggacacaaactccccccgctacgtccgctgctcaatgccgcgctgattggcctgttattgctggctgtcggtaatggcatggtgacggttgccgaacatcaaaatgttccttccggcatcgccgccgtagtggttgcaaccgtgcccctctttaccctgtgcttcagccgcctgtttggcattaaaacgcgcaaactggaatgggtgggtattgccattgggcttgccggaatcatcatgctcaatagcggtggaaatttaagcggcaatccgtggggcgcgattctgattttaatcggcagcattagctgggcgtttggcagtgtttatggcagccgcattaccttacctgtagggatgatggcgggtgcgattgagatgctggcggcaggcgtggtgttaatgatcgcgagcatgattgcgggtgaaaaactgacggcgctcccttcccttagtggcttccttgcggtcggctatctggcgctgtttggtagcattatcgccatcaacgcttatatgtatttaatccgtaatgtcagtccggctctcgccaccagctacgcttacgttaacccggtggtcgcggtcttgctgggtacgggactgggtggagaaacactgagcaagattgaatggctggcgctcggcgtaattgtcttcgcggtggtactggtcacgttgggaaaatatctcttcccggcaaaacccgtagttgcgccagttattcaggacgcaagtagcgagtaatcaagcgagtaaatgaatcccctgcgtgtcgatctgcgcgctggcaccttcgccgcagatccactcttccagacgctcggtaagcgcttcatccgtcagcttctcgcgcccacgtaacgcgcactcccagacaatcaatacgcgccagccgagttcctgcaagcgactgatatcgcggcgatcgcgctcaacatttttacctatcttctccagccagaactcggttcgagtcgcaggcactttaaacagatagcagtgatgatgatgccagaagcagccatgggtaaatatcacgcagcgatattcatcaacgacaaaatccggacgtccgggcagactggcgtcctgaacgcgaaatgccaggccctgcccggttaacagactggcgaggcgcttctctatcgccgtatcacgcgtggcaatcgcgcgcatatttttgctgcgagtggccttatcgtgaacgtcggccatgttgtgcctcttgctgacgcttagttatcgactacgtcggccatgttgtgcctcttgctgacgcaacgccaccgcctgtttgatttttggctcaagcagttttgccaccgcggcaaagaccggcacgaccacgctgttaccgaactggcgataggcctgagtgtcgctaaccggaatacggaatttcgcttctcccggcgcttcaaaacccattaagcgcgcgcattcccgaggcgttaaccgacgtggacgatgttgctgattcagcggatcgtcaaagtctttctcacccgtggccatatcccagccgcgatcgattaaaatttccgcgccatctttgtaataacgcgcagacagcgtacgcgtgacgctttgcggattgttcggataaaccattccataaccgaagccgttaccgcgcgcctgatgttttttcgcatatcgatagaggtacttccacagcaccggcgtcaggatatatttcgcctcgaccatcgggtccaacagctgcgccagcgtcactcgctgcgcagggaaacattcgctgatatcacgcagggtaaaatcggctttcagattcagatcgcgacgaaaacccaccagcacgatgcgttcacggtgctgcggcagaaaatgtttgccgtcgatgattttcggatcgtctggcccattatcttctgcatcagccacgtcatagcccagttcgtccagcgtctgcatgatgatgcggaacgttttaccctggtcgtgacttttcaggtttttgacgttttcgagcacaaacatcgccggacgacgcgcgtcgataatgcgtaccacatcaaaaaacagcgtgccctgggtatcgcaggcaaaaccgtgcgcccgcccgaggctgttctttttgcttacgccagccaggctaaatggctgacaagggaaaccggccagtaaaacatcgtgttcaggaatgtgttgacgaatatgttccgccgccgcctcatcactcacgccttctttatggctgagggtgatgtcgcggatatcttcattaaaatgatgcgtcgccggatcgcaataatggttggctttataagtgcgtaccgcatgtttgttccattcgctggtaaacacgcactgtccgccaatgctttcaaaaccgcgacggatgccgccaattccggcgaatagatcgataaagcgaaacgcataatgcggatgatgtgccggtggtttgggtaataacgtttgcagatgggcgaactctttctcacttaaacggtgccatgcgctgtcattcgccagcgcacgttttaaaattgccgcgctccagtgattctcacctacaccattaagctgcgccaccaacgttttaacatcataaatttgcagcagtttctccagcattgcctgtgcggcattcccggtgctgtaactatcggttacacttatattttcctgcatagatttcaccggccatctgagatggccgacaggttaacataattacagccatttagggccacgcgctcagccagcggaactaaacgcatctatcaccttgtgatcgacaccttcattctcccccgccagttcggcactgagcttcgccataaactcgactaaaaaatgcgcgttgtgctgcgccagctgcttgcctcttgcggtttgcatggtttgcggtagcttcagcaacttagtctggaaatgatccagcgcgtagcgtttatcatcaagcgggcgatgctgtgcgaacggatcttcaccatcaaacagcgccacgcccaatgccccactaacggcaaacacgcgcgccaggccaatcgcccccagggcttccagccgatccgcatcctggacaattttagcttccgttgttaagggggcgatttgcgcgctgaaactgtgagcggcaatggcatgacaaacggcctcgattttctccgccggaaattgctcgaactcttcacggagcaggcgacgcgtctcttctgccgccaggatactagaacgctgcctttgcggatgatttttcgccaggctcacaatatcgtgaaaataacaggcggttaaaatcaccagcatatcgacatcgtcatctgccgccagcttctgtgccgtagcccagacgcggcgaaaatgacacacgtcatgggccgcgtcctggtgctgatgatggtttttcaaccagttttcgaactgtgcctgccagtgttgtaagtccatacgcgctccgttgccaaagagtcgccaccttagcagtttttattcatagcgtctgctacgtgcgggacgaggtcgggtgtaccaggcaatgctgcctaacaatgccccgaccagagccataaataaaaatccgaccagtgcccctaaccactttcccgcggtagagcctaaatcgctttcaaatccgctcacgggggcatcgggaatccggctcatcacccagatgtaacgcgccattgcccagacgaaatagccacaccatgtatagaaagcccacaaagccagtttgccgccagggctgcgagagagtctctcttccatctttgtgctaccgtattccattttgagataacccggaaaattcagacttagtactattatgtgataaaagtcacatttttccacattggatgagccagtcaagactcaatcattttttgaacaaatagataaattttgcgcaacggcagtgaatacaggaaaaatcgttttgagcgattttatttatctttgatatcggctttattaattcatttaatcaatatattagcactgattacaattatacctttttattattctgtgtcatgatgcttccgttattagccttttatcgtcttgtttatattttttgggccggcatgatgccggctttttttatgccttcattaatgtgcgcctgatcacaccagccgtttggcgcaacaatcattgataccccctatgtttccgctcaactcataacatattgatatacatttataattttcatgaatatttatatttagaattcataattatgaattatattaaatagattagaaacattttgatatcttttaaatacatttgttacatgtaatccttaaaataaaatgaacttcatagaatagtatccaaatgtgctttttttggataacggcacttattgatatattcatgaagattataatcacaagggaatacataatgaaaagaaaagttctggcaatgctggtcccggcgttattagttgctggcgcagcaaatgcggctgaagtctataataaagatggtaataaactggatttgtacggaaaagtagtgggtctgcactacttctctgatgattctggcagcgatggcgacatgtcatatgcccgtatcggtttcaaaggtgaaactcagatcgctgatcaattcactggttatggtcagtgggaatttaacattggcgcaaacggtcctgaaagcgacaagggtaataccgcaacgcgtctggcatttgcaggtttaggctttggtcagaatggtactttcgactatggtcgtaactacggtgtcgtatatgacgtagaagcatggaccgatatgctgccagaatttggtggcgatacctatgctggcgctgacaacttcatgaacggtcgtgctaatggtgttgcaacctaccgtaacaatggcttctttggttaggtcgatggcttgaactttgctttgcaatatcagggtaataatgaaagtggtggaccattcgggcaggaaggttccggtagtggtgatggccgtagcctttccaaagaaaatggtgatggtttcggtatgtcaacatcctacgacttcgacttcggtttaagtctgggtgctgcatatcaaactctgatcgttcagatcgtcaggttggagttggtttaaatgatcgtaaccatagcaacagaaatgctggtggtgaaaccgctgaagcatggactgttggtgcaaaatatgatgctaataatgtgtatttagcagctatgtacgctgaaactcgcaatatgaccccatatggtggtggcgagtttgataatggtgaatcaagatcagccatcgctaacaaaacccaaaactttgaagttgttgctcagtatcagttcgactttggcctgcgcccgtccatcgcttacctgcaatctaaaggtaaggatttaggcggttgggctcatgacggcaacggcgacccacgttacaccaataaagatctggttaaatacgttgatattggtgcgacctactacttcaacaaaaacatgtccacctatgttgattacaaaatcaacctgctggacaacgacgatgacttctacgaagcaaacggcatcgctaccgatgatatcgttgctgtgggcttagtctaccagttctaatcagtcaactcgctgcggcgtgttactgtaaaactgaacactagcctgagttcgtccctcatcgaactcaggcttttttattggcatttcatctccatctgcggcacacgcaattgccgaagcatatcgatacagcaccttaccctgcccctcctggcacaataacatcaaccagctactcttcaagctaacacccaaatgcatttctttatgaattaatccgtaacaaacacgcttcccatatagaaatatttgcaaaaatagtgcatgaaataagctttttctctaccaatccgggatataaatattcatcagcaccacaatattccacagcactaaatctctccccgccaccccgtacctctgataatggtctaaaatcattgaagccacttgcgacgacgttgctcaataaggaaaatttggcgtgaataatattcaacaccagtgcagcatcatcattacatacttacagccgccgactaccgctttcgatatattgactcaattttccagcctggttaaaaatagcgaccagctcagtcgcaaatatagtgactaccctaactaagcaacaataaggaatacactatgactgttcaaacaagtaaaaatccgcaggtcgatattgctgaagataatgcattcttccctagtgaatatagccttagccaatataccagtcctgtctctgatcttgatggcgtggactatccaaaaccttatcgcggtaaacataaaattctggtgatcgccgcggacgaacgttatttgccgaccgataacggaaaactgttcagcaccggtaaccatccgattgaaacgttgctgccgttgtatcatctccatgctgcaggtttcgaattcgaagtggcgaccatttccggtctgatgaccaagtttgaatactgggctatgccgcacaaagatgaaaaagtaatgccattctttgagcagcataaaagcttgttccgcaatccgaagaaactcgcggatgttgttgccagcctcaacgctgatagcgaatatgcagcaatctttgttcctggtggtcatggcgcacttattggtttacctgaaagccaggacgtggctgccgctttacagtgggcaatcaaaaatgaccgttttgttatctccctttgccacggcccggcggcttttctggcgcttcgccacggcgataacccactgaatggttattccatttgcgcattcccagacgccgcagacaaacaaacgccagagattggctatatgccgggtcatctcacctggtacttcggcgaagaactgaagaaaatgggcatgaatatcattaatgacgacatcaccgggcgagtacataaggaccgtaaacttctcaccggcgacagtccttttgcagcgaatgcgttgggtaaactggcggcgcaggaaatgctggcagcttacgcgggttaatccctgttacgtttgaatgtaagcgcataatcaatcgcggccgcgttagtactcacgacgtggctgcgttttttcacggttaatttatggcgtactgaagccctatgttaatttctttgcggtaacgtaatccggaacacattatgcttattgagatagtgatacgtagcacttcccccatgcaattcggcaatcgctttgactaaagaaaggcctagtccctgacctacggaatgacggctattatctccccgccaaaatctacggaagagtttttcaggctcattaattttcgttccagggctggcgatatcaatattaagatagctgttggtatcaagaaaactggttatatgaatacggcttttttctgggctatatctaatggcattaacaataagattgcttaacattcgttgtagtaaaattttatccgcaaagatttgctgattgcactcgaccttaaagcaaatctctttctcgtcactaaggtattcaagatagtccaacaaattttcgacttccttattgagagaaaggctgtccagtttcaccaaaacattgtttttatctgccctggcaagaaacagtatgttctctgttaaccggctaatattttccagctcttcaatgtttccggcaattgttttttgatattcagcgatacttctggtttgactgagcgtaacctgattctgacccagtaatgcattaattggcgttctaagttcatgagcgagatcgtcagcaaactgacttagacgctcaaaatctttgactaaagcatgatgcattttattcaacgcctgcccaagaggttttagttctctcggtaatgcgctaacctcaacaggctctcggctatcgttataattcagcgcttccgttacaccactcaactttttgatctctcgtaatcccgttctgattaacagcggacttaatacactgcaaagtacaatggcgacaatgcaaattataatgctattaattttatactgttcaagcatgttatgtctggcactagccaatttagccacagtaaccgttaaacttgggctaacttcatcaatattaattcgtaaagcatctatctctgtatcattaataatgcttctgtaaatgccagctgcgctgattgtctcactagcaggtatgttatttaacatgccatcactgacatttgtccggttaacaattttattgatgctatcaccatgaataatcaagatatcctgactaacatccatcatccggttaaagtacacaggtaacgtatctggatttaccccatcaattaacaactgcttgatctgcgctgtccggttaatgagtgttgtatcatcgcgccatttcaactcacttgccaggccattatagagagtccagacaattccggcgccagcaacagacagtagcaatataaaaagcaaggttaaacggacggttatagatagtcttttcattatttttttaccgctacgaaactatagcccatcccccggattgtggcaattagcttttcaggaaaaggatcatcaacttttgcgcggagcctgcgaatggcgacgtccaccgtattggtatcactatcaaagttgattccccaaatttcactcgcaataaccgttctgggtataatttcgccagctctggaggccagtagccaaagtaactgaaactccttgcgcgtcagtgtaatactgatattgtccctgctcacactatgactaacagagtccattcttaagccgctgatttctaatgtactattcaaagcgtgatgttgccttaattgtgcccgaacccttgccagcaactcagaaaaactaaaaggttttaccagataatcatttgccccactgtccagccctctgactctgtcatcgacagaatcccttgcagtaaggcaaataacaggggtttgctttgctgttcttaacgtttgtaagatctgccagccatccatacccggaagcataatatccagaatgatcaatgcataatcatccttcagcgcaagataaagcccatctctgccatcagaaacggcatcgatgacataacccgcttcggaaagcccctgcgttacccattcctgggtcctttgattatcttcaataagtagaatcttcatgaaaataatatgccataaatcatatgttatagaaacagcctggttcattacaaaattgtaatgctgctgtaaggttaccctggacgctttttcgctatcctcaaaactcattcacatgacaaggatataaacatgttaaagcgttatttagtactcagcgtagcaacggcagcatttagtttaccttctttggttaatgccgcacaacaaaacattcttagcgtgcacattttgaaccagcaaacaggaaaacccgctgctgacgtgacagtcactcttgaaaagaaggcggataacggctggttacaacttaataccgccaaaacagataaggatggacgaattaaggcactgtggcccgagcaaactgcaactacgggcgattaccgtgtcgtatttaaaaccggggactatttcaagaaacaaaatcttgaaagtttcttccctgagatccccgttgaatttcatattaataaagtgaacgagcattatcatgtgcctttattacttagccaatatgggtatagtacctatcgtggcagttaatgcataaatatgtaaaagcagatctctgctactgttagggaggacactccctgacagattaacagtaaacggctcttgctggctaacgacaaaaaagtgtgatggcttatgaaaaagaatcaatttttaaaagaaagtgatgttacggccgagagcgtattctttatgaagcgtcggcaggtgttaaaagcactgggcatcagtgcaactgcactttctttgcctcacgctgcgcatgccgatctgcttagctggtttaaagggaacgatcgcccgcccgcccccgccggaaaagcgctggagttcagcaagcctgccgcctggcaaaataacctgccactgacgccagcagataaagtttccggttataataacttctatgaattcgggctggataaagccgatcccgccgctaatgctggtagcctgaaaaccgatccatggacactgaaaatcagcggcgaagtggcaaaaccattgaccctcgatcatgatgacttaacccgtcgcttcccgctggaagagcgtatttatcgtatgcgctgcgtggaagcgtggagcatggtggtgccgtggattggttttccgctgcacaaattgctggcgcttgccgaacctaccagcaatgcgaagtatgtcgctttcgaaacaatttatgcaccggaacagatgccaggccagcaggaccgctttatcggcggtgggctgaaatatccttatgtcgaaggattgcgtctcgacgaagcaatgcatccgctcacactgatgaccgtaggtgtttatggcaaggcgttaccgccacaaaatggcgcgccggtgcgactgattgtgccgtggaaatatggctttaaagggattaaaagcatagtcagtattaagctgacccgcgagcgtccgccaaccacctggaatctggcagcgcctgacgaatacggtttttacgccaacgttaatccgtatgttgatcacccgcgctggagtcaggctaccgaacgatttattggtagtggcggcatcctcgatgtacagcgccagccaacgctactgtttaatggttacgccgcccaggtggcaagcctgtatcgtggcctggatttgcgggagaatttctaaatgcgtctgacagcaaaacaggtgacatggctgaaagtttgcctgcatcttgccggattgttgccgtttctctggctggtctgggcgatcaatcacggtggactgggtgccgatccggtgaaagatattcagcattttactggtcgcactgcactgaaatttttgctggcgaccttgttaatcacccctctggcacgctacgcaaaacagccgttattgatacgcactcgccgcctgttaggattatggtgctttgcctgggcgacactgcatttaacaagttacgcattgctggagctgggcgtgaataatctggcgttattaggtaaggagttaattacccggccttatttaacgttaggtattatcagctgggtaattttgcttgctttagcgttcactagtacccaggcgatgcagcgaaaactcggcaagcactggcaacagttgcataatttcgtctatcttgtcgcgattctggccccaatacattatctgtggtccgtgaagattattagtccgcagccgctcatctacgctgggctggctgtactgcttttagccttacggtataagaagttgcgttccctttttaaccggttacgcaagcaggttcacaacaaattatctgtataacttcatattgccgacaaagtacgcgttatccctgccggatgtggcgcgagcgccctatccggcatacacagatcgcatcaggttatgtttcgtttgtcatcaacctcaaatcaccaaaataatttattttatttcaataagatagataagtagaactgagaaagccatgctctcgtttcctaagagttgttgcattttgctatatgttacaatataacattacacatcatatacattaactctggaggaaactgttttggcgattcgtctttacaaactggctgttgctttaggtgtctttattgttagcgctcctgcctttagccatggtcatcacagtcacggcaaacccttaacagaggtcgaacaaaaagctgctaatggtgtttttgatgatgccaatgtacaaaaccgaacgctcagtgactgggatggagtctggcaatccgtttatcctttactgcaaagtggcaaacttgaccccgtctttcagaagaaagcggatgcagataaaactaaaacatttgctgaaattaaagattattatcacaaaggttatgcaacagatatcgagatgattggcattgaggacggcattgttgaattccatagaaataatgaaacaacaagctgtaaatatgattacgatggatacaaaatactcacctataaaagtggcaagaaaggcgttcgttacttattcgaatgtaaagatcctgaaagcaaagcccctaaatatatacaatttagcgatcatataattgcaccacgaaaaagttctcattttcacatttttatgggtaatgatagtcagcaatctttattaaatgaaatggaaaactggccaacgtattatccatatcagttgagtagcgaagaagtggtcgaggaaatgatgtctcattgagtattctcatgataacgcctcgatgccgctttagtaagttatcataactgccactggtccatccacaaacgccactgaacgcaagctagctacagacacgctcatcactatgacgtgtctgtatattaataagctaacccgcattgagttaaccaataacggattccatacacaatacggccaacagagaaagatacctgtgctcacgccattgcttatattggctggttacaatatgcactatcaattttttaaataacaaattattaaaaccacatctgtataaggaatttttaaggttcgtgggatagcttgactgtgaaaatcacaggagctacaaaaatgaaccgattcagtaaaactcaaatttatttacattggataacgctgcttttcgttgcaataacctatgccgcgatggaactccgtggctggtttcctaaaggtagtagtacttatctgctgatgcgagaaacacattacaatgcgggtatattcgtttgggtgttaatgtttagtcgcctgattataaaacaccgttatagtgatccttctattgtgccaccgccacctgcctggcaaatgaaagcggctagcctaatgcacatcatgctttatataaccttccttgcacttcctctgctggggattgctttgatggcttacagtggaaaaagctggagtttccttggtttcaatgtgtctccctttgttaccccaaacagcgaaattaaagcactgataaaaaatattcacgaaacctgggcaaatataggctactttttaatcgcagctcacgctggcgcagcactctttcatcactacattcagaaagataatactctgttacgaatgatgcctcgccgcaaataagtcgatccccttacaaggaaatgtgaaccatggacatcaacgcgtcataaatgtttacgcaagtgcacaatgcaccctttccactatcaacaaggaggagcagaaactgtgtaaatcgtacaatggtaagacttatcaaaaatacaggttaattttggtatttaaaccttttttacttgttagtatgatacaaaggctttcaaaaaagctgcgaaattcaacaactcttggaaattatggactttgtcccgcggctttaatctgacggccgcgttccttttttgactcaattattgaacccttctctacgcaacttcagttcccaccaccaactttgcggcagtttcataggatgaatgtctaaaagaataatggtgagcgataagaaaacgactgaataactgcacattttcgctcgaaagcttcctgtcagatccatagcgaatcaagtgctgaatgtcacagtatcgaacagaaaacagtgacgatctaacccttcaagaatattctacgattgttctgtttaggaaaagaaaggcgggaagtcgggagataagtcattgataaaggttcagatggttgccatgatgccaggaaatttggcattttaacagtccctgtccgtgcaattttgttcaagtgacgagtttgcgagcaaaacgatgattaagtggccctggaaagtacaagaaagtgcacatcaaactgcccttccctggcaggaagcactaagcatcccccttttaacgtgtctgacggaacaggaacaaagcaaattagtcactcttgccgaacgttttttacagcaaaagcggcttgttcctttacagggctttgaactggatagtttaagaagctgccggatagcacttctattttgcctacccgttctggagttaggactggaatggctggatggttttcatgaagtcttaatttatcctgcgccatttgtggtcgatgatgaatgggaagacgatatcggtctggtgcataaccaacgtattgttcagagtggtcagagctggcagcaagggcctatcgttttgaactggttggatatacaagattcttttgatgcttctggttttaacctgattattcatgaagtcgctcataagctggacacccgtaacggcgatcgcgccagcggagttccctttattccgttgcgtgaggttgctggctgggaacacgatcttcatgctgcaatgaacaacattcaggaagaaatcgaattggttggcgagaatgcggcgagcattgatgcttatgcagccagcgatcctgctgaatgttttgccgtactttctgaatatttctttagcgccccagaactttttgctcctcgtttccctagtttgtggcaacgtttctgccaattttatcaacaagatcctttgcagagactgcatcacgctaatgatacagacagctttagcgcgacgaatgttcattaattaacaactttgcagattaattaaccaattgaaatgacttatgaaatttagtgttgacagacaaggtaccgctaagtaatattcgccccgttcacacgattcctctgtagttcagtcggtagaacggcggactgttaatccgtatgtcactggttcgagtccagtcagaggagccaaattctaaaaattcgcttttttagcgcaatgtcactgaccttagttgaacattgttttttaacggatagcgggtttttaacatcttaagcgccctcgacctttatggttgagggcgttttgctatgaacgccatcaccattttcccctcgattataaaacttgagttattcagtagtctcccctcttgcaactcacacccaaaactgcctaacgaaaagttattaattttcaatcatattgctatcagtatttacattttttcgctgtgctagaaagggcgcatttatgttagctcgtagtgggaaggtaagcatggctacgaagaagagaagtggagaagaaataaatgaccgacaaatattatgcgggatgggaattaaactacgccgcttaactgcgggtatctgtctgataactcaacttgcgttccctatggctgcggcagcacaaggtgtggtaaacgccgcaacccaacaaccagttcctgcacaaattgccattgcaaatgccaatacggtgccctacacccttggagcgttggaaagcgcccaaagcgttgccgaacgtttcggtattagcgtggctgagttacgcaaactcaaccagtttcgtacgtttgctcgaggttttgataatgtccgccagggtgatgaactggatgtcccggcacaagttagtgaaaaaaaattaaccccgccgccgggtaatagcagtgacaacctcgagcaacagatagccagtactagtcagcaaatcgggtctctgctcgccgaagatatgaacagcgagcaagcggcaaatatggcgcgtggatgggcctcttctcaggctagtggcgcaatgacagactggttaagccgcttcggtaccgcaagaatcacgctgggcgtggatgaagattttagcctgaagaactcccagttcgattttctccatccgtggtatgaaacgcctgataatctctttttcagtcagcatactctccatcgtactgacgagcgtacgcagattaacaacggcttaggttggcgtcatttcactcccacatggatgagcggcatcaacttctttttcgaccacgatcttagccgttaccactcccgcgccggcattggcgcggagtactggcgcgactatctaaaattaagcagtaacggctatttgcgactgaccaactggcgcagcgcacctgaactggacaacgattatgaagcacgcccggccaatggctgggatgtacgcgcagaaagctggctacccgcctggccgcaccttggcggtaaactggtctatgaacagtattatggcgatgaagtggccctgttcgataaagacgatcggcaaagtaatcctcatgccataaccgctggacttaactatacccccttcccgctgatgaccttcagcgcggagcaacgccagggtaaacagggcgaaaatgacacccgttttgccgtcgattttacctggcaacctggcagcgcaatgcagaaacagcttgacccgaatgaagtcgctgcacggcgtagccttgcaggcagccgttatgatctggtggatcgcaacaacaatatcgttctggaatatcgcaaaaaagaactggttcgcctgaccctgacagaccccgtgacagggaagagtggagaagtgaaaagtctggttagcagcctacaaaccaaatatgccctgaaaggctataacgtcgaagccaccgcactggaagctgccggtggcaaagtggtcacaacgggtaaagatattctggttaccctgccggcttaccggttcaccagtacgccagaaaccgataacacctggccgattgaagtcaccgccgaagatgtcaaaggcaatttgagcaatcgtgaacagagcatggtggtcgttcaggcacctacgctaagccagaaagattccagcgtaagcttaagtacccaaacattgaacgcggattcccatagtaccgccacactgacttttattgcgcatgatgcagcaggtaatcctgttgtcgggctggtgctcagcacgcgtcacgaaggtgttcaggacatcaccctttctgactggaaagataatggtgacggaagctatacccagatcctgaccacaggagcgatgtctggcacgctgacgctgatgccacagctgaatggtgtggatgcggctaaagcccccgccgtggtgaatatcatttctgttagcagttcccgaactcacagcagtattaagattgataaggaccgttatctctccggcaatcctatcgaggtgacggtagaactgagagatgaaaatgacaaacctgttaaggaacaaaaacagcaactgaataacgcagtcagcatcgacaacgtgaaaccaggagtcactacagactggaaagaaaccgcagatggcgtctataaggcgacctataccgcctataccaaaggcagtggacttactgcgaagctattaatgcaaaactggaatgaagatttgcataccgctggatttatcatcgacgccaacccgcagagtgcgaaaattgcgacattatctgccagcaataatggtgtgctcgccaatgagaatgcagcaaacaccgtcagcgtcaatgtcgctgatgaaggaagcaacccaatcaatgatcataccgtcacgtttgcggtattaagcggaagcgcaacttccttcaacaatcaaaacaccgcaaaaacggatgttaatggtctggcgacttttgatctgaaaagtagtaagcaggaagacaacacggttgaagtcacccttgaaaatggcgtgaaacaaacgttaatcgtcagttttgtcggcgacagcagtactgcgcaggttgatctgcagaagagcaaaaatgaagtggttgctgacggcaatgacagcgtcacaatgaccgcgaccgtccgggatgcaaaaggcaacctgctcaatgacgtcatggtcactttcaatgttaatagtgcagaggcgaaactgagccaaaccgaagtgaatagccacgacgggatcgccacagctacgctgaccagtttgaaaaatggtgattatagggttacggcctctgtgagctctggttcccaggctaatcaacaggtgaattttatcggtgatcaaagtactgctgccctgaccctcagtgtgcctagtggtgatatcaccgtcaccaacacagctccgcaatatatgactgcaaccttgcaggataaaaatggcaacccactaaaagataaagaaatcaccttctctgtgccaaacgacgtcgcaagtaagttcagcattagcaacggaggaaaaggcatgacggatagtaacggggttgcaatcgcctccctgaccggcacgttagcgggcacgcatatgatcatggctcgtctggctaacagcaatgtcagcgatgcacagccaatgacgtttgtggcggataaagacagagcggttgtcgttttgcaaacaagcaaagcggaaatcattgggaatggcgtggatgagacaactctgacagcaacagtgaaagatccgagcaatcatccggtggcggggataacggtaaacttcaccatgccacaggacgttgcggcaaactttacccttgaaaataacggtattgccatcactcaggccaatggggaagcgcatgtcacgctgaaaggtaaaaaagcgggcacgcatacggttaccgcaacgctgggtaataacaataccagtgatagccagccggtaacatttgtggcggacaaagccagcgctcaggttgtcctgcagataagtaaagatgagatcacaggtaatggcgtcgatagcgcaacgctaactgcaacggttaaagatcagttcgacaatgaggtgaataatcttccggtaacattcagcagtgcctctagtggactcaccctgaccccgggagtaagtaataccaacgagtctggcatcgcgcaggccactctcgcaggcgttgcctttggtgagaagacggttactgcaagtctggctaataatggtgccagcgacaacaaaactgtgcattttattggcgacacagcggcggcaaaaattatcgagttggcgcctgtcccagacagcataatcgccggtaccccgcagaacagctccggcagcgtcatcaccgccacagtcgttgataataatggctttccggtgaaaggtgtgactgtgaacttcaccagcaacgcagcgacagccgaaatgacgaacggcggtcaagccgtgacgaacgaacagggtaaggctaccgtcacttataccaatacccgctccagcatagaaagtggagcgagaccggataccgttgaggccagtctggaaaatggtagctccacgcttagcacaagtattaatgtcaacgctgatgcgtctacggcacatctcaccttgctacaggcactttttgatacagtctccgcaggcgagacaaccagtctgtatattgaggtgaaggataattacggcaacggtgtcccccagcaggaggtaaccctcagcgttagtccaagtgaaggcgtgacccccagtaataacgctatatatactaccaaccacgacggcaatttttacgcaagctttaccgctacaaaagccggggtttatcaattgacggcaaccctcgaaaatggcgatagcatgcaacaaacagtgacctatgtgccgaacgtcgcgaatgctgaaatcacgctggcagccagcaaggatccggtgattgccgacaataacgatctcacgacactaacagcaacagtcgctgatacagagggcaatgcgatagccaacactgaggtaacatttactctgccggaagatgtgaaggcgaacttcacgctgagcgatggcggtaaagtgattactgatgctgaaggcaaagcgaaagtcacgctgaaaggtacaaaagcaggcgctcatactgttacagcaagcatgactggcggtaagagtgagcagttggtggtgaactttattgcggatacgctcactgcgcaggttaatcttaacgttaccgaggacaattttatcgctaataacgtcgggatgaccaggctgcaggcaacagtgactgatggaaacggcaacccgttagccaatgaggcggtgacattcacgctaccggcagatgtgagcgcaagctttactctcggacaaggcggttccgccattactgatatcaacggcaaggctgaagttacactgagcggtacaaaatccggcacctaccccgtgacagttagcgtgaacaattatggtgtcagtgatacgaaacaggtgactttgattgccgatgctggtaccgcaaaactagcctccttaacctctgtatacagtttcgtcgtcagcacgaccgagggcgcaaccatgacggcaagcgtcactgacgctaacggcaacccggtagaaggcataaaagttaatttccgcggaacctccgtcacgctaagcagcaccagcgttgaaacggatgatcggggtttcgctgaaattcttgtgacaagcaccgaggtcggactgaaaacagttagtgcctctctggcagataaacctactgaagtcatcagccgattactgaatgccagtgcagatgttaattctgcgacgattaccagtctggagataccggaaggtcaggtaatggtcgcacaagacgtagcagttaaagctcacgttaacgaccagtttggcaacccggttgcgcatcaacccgtgacattcagtgcagagccatccagccaaatgatcatcagccagaatacggtctctactaatacgcagggtgtagccgaggtcaccatgacgcccgaaagaaacggtagctatatggtgaaagcatccctgccgaatggagccagtcttgagaaacaactggaggctattgatgaaaaactgacactcacggcgtccagtccgcttatcggtgtctatgcccctacaggcgctactctgacggcaacgctaacctctgcaaatggcactccagtggagggtcaggtcatcaactttagcgtaacgccagaaggggcgacgttaagtggcggaaaagtgagaactaactctagtggtcaggctccagtcgttttgaccagcaataaagtcggtacatatacggtgactgcatctttccataacggcgtaacaatacagacacagacaaccgtgaaagtcactggcaacagtagcaccgcccatgttgctagctttatcgctgatccaagcactatcgccgccaccaacactgatttaagtaccttaaaggcaacggttgaggatggcagtggtaacctgatcgaaggtctcactgtgtacttcgccttaaaaagcggctctgccacattaacgagtttaacagcggtgaccgatcaaaacggaatcgcgacaacaagcgtgaaaggagcgatgacaggtagcgtcacggtaagcgcagtcacgaccgctggtggaatgcaaacagtagatataacgctggtggctggcccggcagacaccagccagtccgtccttaagagcaatcggagtagtctgaaaggggactataccgatagtgctgaattacgtcttgttctgcacgatataagtggcaatccgatcaaagtttctgaagggatggaatttgtgcaaagtggtactaacgtgccctatataaaaattagcgcaattgattacagtctaaatatcaacggtgattacaaagccactgttacaggaggcggagagggtatcgcaacgctgatccctgtattgaatggtgttcatcaagctggtctgagtaccacaatacaattcactcgcgcagaagacaaaataatgagcggtacagtaagtgtcaatggtactgacctaccgacaactacattccctagccaggggttcaccggggcgtattatcagttgaataatgacaactttgccccaggaaaaacggcggctgattatgagtttagtagctctgcctcctgggtcgatgttgatgctaccggtaaagtgacatttaaaaatgtcggcagcaatagcgaaaggattacggcgacgccaaaaagtggaggccctagctatgtatacgaaatccgtgtgaagagttggtgggtgaacgccggcgaggctttcatgatatacagccttgctgaaaatttttgcagcagcaatggctacacgctccccagagcaaactatttaaaccactgtagttcccgaggcatcgggagtctgtacagtgaatggggagatatggggcattacacgactgacgctggttttcaaagtaatatgtattggagttctagtcccgcaaacagtagcgaacaatacgtagtttccctggcaacaggtgatcaaagcgtatttgaaaagcttgggtttgcttatgcgacatgttataaaaacctgtgattttccgttataatttcttaaagagtgttccattcggggcactcttttttacattccctctacagaactagcccttctctcacagaaaatgaataaataaaaatgcggcaccgccagaatcgcgttcgatgtgactatgatcattttcggtgagtactgctttgatctaaaggctggttttctgtgatgattgaccagcctcagagtattgatgacaccaccgttcataacagatcggcattactatgcataagtactgtctcatattctcgccaaaacactttttaatgcctttgcgaattcatccagacttatattgtcaattttttgcccaacgacgactgactccgagacatcggccattgcgggccatcgcgttttgtaatcagcataaattgcaacaacaggggtattataggcacttgccatatgtaatattgaggtgtcaggagttattgcgatataagcatcttttatgattgctgctgaacgtttaatcgagggtggtaaggataaacggtagacattattataacaatccactaatgccctggctttatcttcacctttgggtccatgaacgatcactattggtatatctgtttcactttaaatttttgctattagattttctgcaatcgataatgaaaatgtacgttcctgcgagctaccttctaaattgaacgcaatgtaagatcctaacgatcgcatttcctcgcgcacctcatcgagtacatcctcacttagtggcaattcatatattggcctgactgctggaaaacccgcctcacgcatcataaatgcccatgtcataggtacgggagcccggagtttctgatccatactggacgcgttcttgcacaaaggggagaagcaattcatggttataccaacaacctgaaaattcgtttttgctttcaactgactgataaataacatcgttttcaggttctttttacgcatcccctcaatgcaaagatccggcgtaccgtattgctgtgttatgttctttgctaaatcttttatttcttttaatgttgcgtgatcctgcatagtcattgtgactaatgttaatttagtctgttcaagtttaagcgcattaaagacttctaaattaattgtcgacgttacaattaaaagatgcttaattttatgcaattcaagcgcccgaataacaggaaagatggccatagcatcgccaatctgatcgggaatatggatgacaacaaagtctgttttttcaatattgaaattataagctttataatcgtagtaactaaatgcaatacgtctcaacaatgatgctaaaaacatacctaacctcgcctccctactggttataatgcaatgcagtctatcagactcatcagggtgccattttgtgcatatgcggacttttatgtttcatatctctaacctgtgggtcctctgcttaatccttaaacaacaccagcaactcctgcgctttcatcttccatcgaatttttcatgttgccgctaatcagccataaaatcatttgcagatgcgctctgtcgaggtagtctcataaggttcgtttatagatcgacggcaatgtgagttaccttttccatactaattataaaaagacagtacaaacaggatcattatggactccacgctcatctccactcgtcccgatgaagggacgcttagcttaagtcgcgcccgacgagctgcgttaggcagcttcgctggtgccgtcgtcgactggtatgattttttactctatggcatcaccgccgcactggtgtttaatcgcgagtttttcccgcaagtaagcccggcgatgggaacgctcgccgcatttgctacctttggcgtcggatttcttttccgtccgctcggcggtgtcattttcggtcactttggcgaccgactgggacgtaagcgcatgttaatgctgaccgtctggatgatgggcatcgcgacagccttgattggtattcttcctagtttcagcaccattgggtggtgggcacctattttgctggtgacactgcgtgccattcagggatttgcagtcggcggcgaatggggaggcgcggcgttgctttccgttgaaagtgcaccgaaaaataaaaaagccttttacagtagcggtgtacaagttggctacggtgtaggtttactgcttagtaccggactggttagtttgatcagtatgatgacgactgacgaacagtttttaagctggggctggcgcattcctttcctgtttagcatcgtactggtactgggagcattgtgggtgcgcaatggcatggaggagtccgcggaatttgaacaacagcaacattatcaagctgccgcgaaaaaacgcatcccggttatcgaagcgctgttacgacatcccggtgctttcctgaagattattgcgctacgactgtgcgaattgctgacgatgtacatcgttactgcctttgcacttaattatagtacccagaatatggggctaccgcgcgaacttttccttaatattggtttgctggtaggtggattaagctgcctgacaattccctgttttgcctggcttgccgatcgttttggtcgccgtagggtttatatcacaggtacgttaatcggaacgttgagcgcatttcctttctttatggcgcttgaagcacaatctattttctggatagttttcttctccataatgctggcaaacattgcgcatgacatggtggtgtgtgtgcaacaaccgatgtttaccgaaatgtttggtgccagttatcgctatagtggcgctggagtcggttatcaggttgccagtgtggttggcggtggatttacaccttttattgccgctgcactcatcacttactttgccgggaactggcatagcgtcgccatttatttgctggctggatgcctgatttccgcaatgaccgctttgttgatgaaagacagtcaacgcgcttgatagcctggcgaagatcatccgatcttcgccttacacttttgtttcacatttctgtgacatactatcggatgtgcggtaattgtatggaacaggagacacacatgaataataagggctccggtctgaccccagctcaggcactggataaactcgacgcgctgtatgagcaatctgtagtcgcattacgcaacgccattggcaactatattacaagtggcgaattacctgatgaaaacgcccgcaaacaaggtctttttgtctatccaagtctgaccgtaacctgggacggtagcacaaccaatccccccaaaacgcgcgcatttggtcgctttacccacgcaggcagctacaccaccacgattactcgccctactctctttcgtagctatcttaatgaacaacttacgttgctgtatcaggattatggtgcgcatatcagtgtgcaacccagccagcatgaaatcccttatccttatgtcatcgatggctctgaattgacacttgatcgcagtatgagcgctgggttaactcgctacttcccgacaacagaactggcgcaaattggcgatgaaactgcagacggcatttatcatccaactgaattctccccgctaagccattttgatgcgcgccgcgtcgatttttccctcgcacggttgcgccattataccggtacgccagttgaacattttcagccgttcgtcttgtttaccaactacacacgttatgtggatgaattcgttcgttggggatgcagccagatcctcgatcctgatagtccctacattgccctttcttgtgctggcgggaactggatcaccgccgaaaccgaagcgccagaagaagccatttccgaccttgcatggaaaaaacatcagatgccagcatggcatttaattaccgccgatggtcagggtattactctggtgaatattggcgtgggaccgagtaatgctaaaaccatctgcgatcatctggcagtgctacgcccggatgtctggttgatgattggtcactgtggcggattacgtgaaagtcaggccattggcgattatgtacttgcacacgcttatttacgcgatgaccacgttcttgatgcggttctgccgcccgatattcctattccgagcattgctgaagtgcaacgtgcgctttatgacgccaccaagctggtgagcggcaggcccggtgaggaagtcaaacagcggctacgtactggtactgtggtaaccacagatgacaggaactgggaattacgttacagtgcttctgcacttcgttttaacttaagccgggccgtagcaattgatatggaaagtgcaaccattgccgcgcaaggatatcgtttccgcgtgccatacgggacactactgtgtgttagtgataaaccgttgcatggcgagattaaacttcccggccaggctaaccgtttttatgaaggcgctatttccgaacatctgcaaattggcattcgggcgatcgatttgctgcgcgcagaaggcgaccgactgcatagccgtaaattacgaacctttaatgagccgccgttccgataataagttctgaaccttcttatcagaaatagatgtgaaggagtaagtaagacacctggcaaatagcctgcaataatcgtgggctgtttgcttccttgggcggatacgagttttattatcgtcttaatgatttccacatattaaaagcaagtatgctttcaaaacacaattataaaaaatcccgccaacaatataagtttttataaaattaaatataagattatggctttagaatatttttatttctaatagacgagatttttcctgttatgatataatatgctgaattaacacatgttaacgatttaccagtaatgtaaataaattttcgaggagatcattccagtgggacgtaaatgggccaatattgttgctaaaaaaacggctaaagacggtgcaacgtctaaaatttatgcaaaattcggtgtagaaatctatgctgctgctaaacaaggtgaacccgatccagaattaaacacatctttaaaattcgttattgaacgtgcaaagcaggcacaagttccaaagcacgttattgataaagcaattgataaagccaaaggcggcggagatgaaacgttcgtgcagggacgttatgaaggctttggtcctaatggcagtatgattatcgccgagacattgactagtaatgttaaccgtacgattgctaacgttcgcacaattttcaataaaaaaggcggcaatatcggagcggcaggttctgtcagctatatgtttgacaatacgggtgtgattgtatttaaagggacagaccctgaccatatttttgaaattttacttgaagctgaagttgatgttcgtgatgtgactgaagaagaaggtaacattgttatttatactgaacctactgaccttcataaaggaatcgcggctctaaaagcagctggaatcactgagttcagtacaacagaattagaaatgattgctcaatctgaagttgagctttccccagaagatttagaaatctttgaagggcttgttgatgcccttgaagatgacgacgatgtacaaaaagtttatcataacgtcgcaaatctctaattatcttttaaagaaatctgtctttacggcagatttctttaatctcatataattcttataaaaaatataatattcaactcgtcatattgattatacccccccgttcccagagaaataatatttattaaaattccagttcttctttttctgattacagaaggcaaagtggcaattacgcatagtttcccgataaagacgcgatagcgacatcccgcataaggcatttttctctttatctttgtacggtacttcatggaacagagtttttgaccttgcgaatcgtgatgtctgttggggagggacaatttgctcactgaagcgtgagactcgattaagcgcacgaaacacagaaatcaaaaaacccggtcacttttttacaaggtaaccgggtaaaaataatttttattttttaactgttttgagactcatagagatgtctcaaaactaaaatttggctcctctgactggactcgaaccagtgacatacggattaacagtccgccgttctaccgactgaactacagaggaatcgtgagaacgaggcgaatattagcgatgcccacccacaatgtcaaagcctgttttttaaatttgaaatcgtttgctgaaataatctgcattttgtcgtttattcgctcacaactggctttttttcacacttttgcggctcgggtcgagggtatttccatagccaacgtccagtaaccattcgccagtaaaacagcacggcccgcacagcccagtcggcaaacattcccatccagacaccaaccacaccccagccaagcatgattcccagcacataaccgactacaacccgacaaccccacatgctcaacatgctaacccacatggcgtaacgggcatcacgagcacctttaaatccagcgggtagcacccaactggcggaccaaataggcataaataaagcatttagccaaatcagaatcacaacgacatgtttaacctgtggatcctgggtgtaaaagcttgccataaccccggcaaagggagccgttagccaggcgatggccgttaatccaagagtggaaagccagaacacatgccgcaactgaatctctgcttgcgctatctgccctacccccaaccttcggcctgtaatgatcgtagaagcagagccgagcgcacttccgggtaagttgataagagccgcaatactaaacgcgataaaatttccggcaataacactggtccccatcccggcaacgaacatttgggttaataaccgaccactggtaaataacacactttcgacactcgcgggaataccaatccccatgacttcccagataatgctaaaattcagcggtttaaaatagctctttaagctaatccttagcgcaggattaaaaccaatcgccagcacccacaaaattgcaactgcgccaatataacgagaaatggttaaacccagccctgccccgacaaatcccagtcccggccaggagaaaaggccgtaaatcaatatgccgctaataataatattaagaatattcaggctaccgttaatcaatagcggtattttcgtattccctgcaccacgaagtgccccgctaccaataagagtgatggcagctgctggataactgagtaccgtcagctccagataagtcaacgccagtgctttaacttctgtcgtggcatcacccgcgacgaaatcaataatttgttcgccaaaatgatgaataagcgttgccaacagtacggcaaacaacgtcatgatcaccaaactctgccgcgtcgccaccctcgctcgtcgtcgatcccgcttaccgagactaaatgccacaacgacagtagtaccaagatcgatagcagcaaaaaaagccataatgaccatattgaagctgtccgccaatcccacgccggccatcgcatcttttcccagccagctgaccagaaaagtgctcagaacccccatcaacaggacacaggcattctccatgaagataggaacagcaagcggggttatctcgcgccagaacaacactttgtagctcttgcgtttagcgtgccagcgagtgccgtgaacaacctggcgtaaagcagaggagatattcaaagcgctccttaattgcagaaagtgaaaccacatttcaaataaactgggagaatcagcaaagctgcaaagattttcgccaacaaattgtctgcaaatgcaacaaactgtacttagaaacggcaaacagttggggaatttaaaaatcgggttactcaaaagatttttcgccgttaagatgtgcctcaacaacgattcctctgtagttcagtcggtagaacggcggactgttaatccgtatgtcactggttcgagtccagtcagaggagccaaattcctgaaaagcccgcttttatagcgggatttttgttatatctgataatcaatttcctcttcactgctttccatcacctgccgcttgatatcctcaacactcagtcctgcattacaaagttccagaaagcgccagacatagttacgctgaagttgtcctcgcttcagtcccaaccagacagtattagcatcaaaaagatgccgcgtatccaggcggattaaattctcttcctcttgttcgccactggattgctcggcaactaatccgatcccaagcccaagagcaacataggttttaatgacatcagaatcctgcgcacttaatacaatatctgccagcaaacctttgcgggcaaatgcgtcatcaatacgactgcgccccgtaatcccctgtcggtaagtgattaacggccacttcgctatactttccagcgtcaatggactaatttgcgtcaagggatgatcgtgtggaacaagcaaactatggtgccaacgaaaccacgggaaggcgacgagctgcgggtcattactcaaacgctcgctggcgataccaatatcagcttcgccattttgcaacaatgtcgcaatttcctgtggcgtcccctggattagctcgagccgaacctccgggaaaagttcgcgaaaagctttaatgacctctggcaagctataacgtgcctgagtatgcgtcgttgcaatagtgagaacgccagacgtatcgttggtaaacaggtctgcaagccgacgaacattactggcttcattcagaatacgttctgcaatgaccagtaatgctttgcccggttcagtcatgcccagcagtcgcttacctcgtcgaacaaatatttcgatgccaagttcatcctccagttcccgaatatgacggctgacgccactctgactggtaaaaagcatattcgcaacctctgtcaggttgtaatcctgacgtgcagcctcgcggattatctttagttgttggaaattcacggtaaactccgggcagttcagatttcccgttattgttaaagtctaatgcccggcataacaaataataaaaacccgcatcttattccatcccgatataacacttagctcaccaattgccactgccttttttccatcactggagaactaatcacactcattaacaactctttcactgcctgtgcctgtgggcttaagttcgctctggcgggtaaatttaaactcaaagagagactcatggaaggagtggtaatgcgactcatccacccatttactgcgccacataagctacgcgcggcgctttcgggtaatactgcaacgcccatgccgctggcaatcgctgcggtaagcgtggcaatagactcaatttcaccaataacttttgccgtgagtcgccgtagggaaaaagcctcatcaacacgaagtctaatagcactgtaatcactggggagaaagaggttcatttgcgcaatagcattcacatcaacgctttgccccgggcaatcttgagttcctaccagaaaaagatcttctttcagcaaagcctgactggatacaccagccacaggggaatgctcataaatcaccgccatatcgagttggtgatttatcaatttttcgttaagcactgcaccactattttcatgaagatagataacgatctccggaaattcagcgcgaaccgcctgtaataagggcatggtgatggaactcgcagcggttcctggtgcaaagccaatgctgacttgcccgcttaatgcctgaccaacgttatgcaccgccagttgggcctgttcacactgacgtaaaatggcccgcgcatgggtatagagaatttttccggcgtctgttggtgtaacgccccgctttgtacggatcaaaagttgttgatttaactcaccttccagtgtggcaacctgctggctgagcgctggttgtgcgatatgcaatacttcagcagcctgggtcaggctaccaatatctacaatttttacgaagtatttcaggcgtctgaagttcatgttgcctccggtttttaagaatcggcccaagtgccgccattacttacaaccagattgcaagatgcttgccagttttattttggtgttgatgtacaagctaaccaactgtcaaataagagattatgatagattcgtcatttgctcctttaatcagctgtcgcgttcccctgccctataaaaggagggtatgcaccacgatggttcattacccaataagattgaaagctcaccactttgttgaaattgacagcaaacaaacaaaaaaatgcatttcaccctttgacatcaccatgcactgccattaatatgcgccccgttcacacgattcctctgtagttcagtcggtagaacggcggactgttaatccgtatgtcactggttcgagtccagtcagaggagccaaattcaaaaaagcctgctttctagcaggctttttgctttctaattaccaacgctcttaaaacatctgtctactaccagaactaatttgcacaggcattccgcttcgacgttgcaacgcagcatttgcgcgatttacatcaacttcttgcccgttgataaacgcccgcaaagatggggttaccggcaatggcacttttcggtcagactcatattctgcacgattgcggctcaatggctcatgaacttccagccagttgctgccatctggttcagtggtgtattttactggctggtcgataatttgcacacgcgtcccaacaggaacattatcaaacagatatttgatatcgtcattgcgcagacgaatacagccctgacttacccggagcccaataccaaaattggcattggtaccatggatggcatacaacctgccaatataaatcgcgtacagccccatgggattatcggggcccgcaggaacaaatgcgggcaaactctcccctcgtttcgcatattcgcgccgagtgttcggcgttggcgtccaggttggagcttcttgtttacgttcaacggtagtcacccagttacgcggggtttctcgcccagcctggccgataccaataggaaagacttccacagtattactgtctggtgggtagtaataaagacgcatctcagcgacgttaacaacaatccctttacgaacagtgtcgggcaaaatcagttgctgcggaatggtgagttggctgccagacttcggcaaaaaaacatcagcgcccgggttcgcttccagcatgttacttaacccttgcccgtattgtgcggcaaaagtctccagcggctgggtattgtgatcaggaacagttacagtaaagctctgccccactaaacggctaccctctggaggtaatggataagttaccgccaggctagtatggctggcaaaaagcagagcaaaactgcaaagaatatttacacgacgcatcatgtccctttcctatgtcgcgaaagctatccgttaagtatagcttttatcagacttttcgtttttaactgttcaaatcagaagtcgtattccccggtagaacaatattactggcagcaagttcgcccatgttgttgtatatcgcacaggcagcttcgatgatgggcatcgccagagctgcgccactcccctcacctaaacgcatctccatattgagataaggctccagccccaaatggctgagcgctatacgcgcgcctttttctgcgctcaggtgagaaggaatgagatacggtttgatcgcaggagacatctggcaggctgcgagcgcagcagcataagaaagaaatccatccagcaacacgggtaaaccgcaggaagcagcacctaacatcactccagctattccgaccaaatcaaatccacccacttttgccaggacatcaacaccatcctgaggatttggttgattcaacgtaatcgcccgacgcacaacatcaattttattagccagtttatctgtcggcaggtttgcgccaatcccaaccacttcttcaggatcccggccagtgattgtgctgactattgctgctgccggtgtcgtgtttgccatccccagttcacctacaccaaacagcgtgacaccgttttttgccagctcctgcgtataacatatgacgtccaaaagcaacttttcagcctgacggcgactcattgccggagcactagcaatattgccgctacctcgtgcgacacgcatgttgataagcccggggataggctcagcagtatcaataccaacatcaattacgtggacgttagcgcccgcttgttctgccagcacacacacgccggttgttccacgggtcatattttcagcctgtatggctgtcacttcttttggagaaatagcgaccccttcctcccagacgccgtgatcggcacacataaccagtaccgcttttttgcccacatgcggtatgccattcaaccccggcattcctgccagttgtatggcaagcacctccagctttcccaggctaccaacaggtttgagtaacccgtcaatatgccgttgtgcacggctcatagcggtagaatcgatggctgggatcgtattcagtaaatcggcaagtatttgcatctcacgtctctttatagcagtgccagcaggaagaccagttcaccaagctctatggctgctcccagcgtatcgcccgtttgcccgcccagcgtacgtttgagaagctgaccgaggatgaaaatcgccaccatcgtcaccaccatagcagccacaccatgcatacccggcaataatacggcagcaaaaatagcggctaagccgagtgtgacgcaggtttgtcgcccatcaattttgccaatgaacacattgccaagcccttcttcccgcgcataacgatgacgatacatcaataatgcggcagtcccgcggctgaccgcacatgctgccgccaggcttgcaaggatgctttcgccacgcagagccaactcgcttaacaccagaatctttgccagtaccacaaaaatcaatgccagaccgccgtgggtgcctaaacggctatcacgcatgatttccaacatgcgatcgcggctacgtgcagaaaatacgccatcacaggtatcagcgaggccgtccagatggaatcccccggtcatcagcaccagcacaagtacgctaaacagtgccgccagtggtgcgccacaccatgcctgcagcaccatgaagaccagcccgctaatcgcgccaagcaataatccaatcaaaggaaaagtaataataccgcgagaataatgctcgaaatccagtccctgggaccagcgacgcggtacaggcagacgcgtaataaaactgagcatcgcccaaaataatttactcatttgatttttactccaataccgctaaccaccagccatacttcatttgccgcagcggccaactgctgatttacccgcccggcaatatcacgaaaatgtcgtgccagacgactctccggcacaatccccattcccacttcgttagtcactaatacaacctttgcggggcaacgttggcaggcagcaatcaagctctgaatctcagcattaatcgcctgttccatcgcctgataatcccattcatcagggtctttatcgccgccataatcaaacaacagattagtcaccattgtggtaacgcattcaagcaacacaacctcattcgggttaatgtctgcatgaattaattcatcaagatgttgccagcgctccactgtgcgccagtgctccgggcggccttgccgatgatgttctatccgtgcagccatctcatcatcaaggatttggctggtagcgatatacagaacctgactagagtccccaataagcgcctctgcgtggcgactcttcccgctccgtgcgccccccgtcaccaaaatcatcataccgactcctgattcaaatgtatgatggtattcattgaacagaacaatggatcccccaccgttgctgaccgcaaaacatttacgcgattaatactgcgcgtaatataattaaaaatccagcattctcaatccattacgaaataagatggcattacggaatagccagactttctcgtgttaacgtccgacaaaatgcgtcattgacagcggtttctgtggattgacacatttcattcagataatgaattaatgctactgccggaacaaccagcaaacgggcattgtgttctgaaatccaggctattgattcaacgtcagcgacagatctgcgctgtaaaagaacttgtaaaacaacgtaatagaattatccggaatggtggcgactatgcactagggaaggtgcgaataagtggggaaattcttctcggctgactcagtcatttcatttcttcatgtttgagccgattttttctcccgtaaatgccttgaatcagcctatttagaccgtttcttcgccatttaaggcgttatccccagtttgcagaaactccgtaatgagattaaaagcgctcataactcatctgtcggccagaaggcgcgcctctgaattatccgacggacaaaccgggaacagtgtaatttcccggcaggagcgaaaaaattgaaaggcgcatcttactcttttcgctttcaaaaaaaagagtggtcatcgcgttaacacaccgccctgagatgaattagtgatgttttggctgcaccgcaacatacatttcgatatcccagtacccatcttccgcgccattgttcaaataaacctcgaagcagggctttggtaacatttcataagcactgtcctgcaagagactattaaagaactgataccagggtttagcaaaatcatcaccgactacacgagctaccgccaccgcatactgaccacctgtaatttctgtcagaatgacgccctcactgttttcgggaagcgtaaagtaacccggcaccgtcacgacggtgtcgcagcgtaatttttcggcgggtgtttcatctggattgtcgtaatagacagcaacccactccttcggcacaatatttttgctatctacccacatcatcaactgctcaaagcctttctttaccgtctgttcccacgggccaacgagatggaaacctgcaacggtacgtttctcttcctgcttaatctcgtagttcatgacgcctccattgatactgtttttatatacagtatagttgcaaaattaaaaccacaaggaatgagtgttgattatgcgagcagactcgcactcctgccagtctgctgcaaaagaaaggtcaggccttatggtggaaataatcactcaggcgagaaaacatgctgccttccccgacagattccagggtaaccagcggccagtgcgccacctgtttatcacggtcgtaaagttcaatttcccctacccgctgatgggcgctaattggcgcggtgagttctttaccatcaagggtatatttggctttgatatgtggaatttcggctttcggtagcaccatccagaactcttgttccgttcccaggtcgatattttctttatcgccataccagatgcgttccgttccgacctttttcccacggtgcaaaatttgcaccgtagtaaagttttgttgcccccaacgcagtaattttcttgcctcttcctcacgaccttttgcactgtcagcccccattaccactgcaatgagacgacgctgcccatctacagcgctagcaatgagattaaacccggcaccagaagtatgacccgttttcaggccgtcaacattcatggttttatcccacaacaacccgttacggttttgctgggtgataccgttccaggtgagacttttctcactgtacatatgataaaactcgggctcgccgtggatgatagcacgagaaagcacagctaaatcataagcgctgctatgctggccaggtgcatccagaccatgcactgtttcaaaatgcgtatccttgagatgcagcttctcggcatagttgttcatcatttcaacaaactgccgttgcccaccggcaatatagtcagccagagcaacacaagcgtcatttccggaatccacaattaaaccacggcttaaatcacgtacgcttacgcgatcgccctctttcaaaaacatcagactagaaccgacaaacaccggattatctttcgcccacgcatcgcgccccacggtgacaatatcgtctggcgtaatgcgatgactatcgatagcgcgatccacgacataacccgtcatcagctttgtcaggctggcgggattgcgctgttgatgctcattacccgcggtgaggatctgaccggtggtgtaatccatcaatacccaggacccggcatgaatctctggaggctgaggactaaaaggaatgttttccgccgcaaaaccagagcttaagttaaaaacgaacaaagaagcagcaataataagacggcgtttcaacagcaaaccctcaggagtttcaaatagctgttctttttacggaaatacttatgaactggctggaataaagtgcaagaaaatgtgactaccctctcatttttatctgacatgatctgttgccactcgctgccaaattgtggcgctaaagctgattagcacggtgatatttgatactctggcagacagcagaaataacggatttaacctaatgatgaatgacggtaagcaacaatctacctttttgtttcacgattacgaaacctttggcacgcaccccgcgttagatcgccctgcacagttcgcagccattcgcaccgatagcgaattcaatgtcatcggcgaacccgaagtcttttactgcaagcccgctgatgactatttaccccagccaggagccgtattaattaccggtattaccccgcaggaagcacgggcgaaaggagaaaacgaagccgcgtttgccgcccgtattcacagcctttttaccgtaccgaagacctgtattctgggctacaacaatgtgcgtttcgacgacgaagtcacacgcaacattttttatcgtaatttctacgatccttacgcctggagctggcagcatgataacagccgctgggatttactggatgttatgcgtgcctgttatgccctgcgcccggaaggaataaactggcctgaaaatgatgacggtctaccgagctttcgccttgagcatttaaccaaagcgaatggtattgaacatagcaacgcccacgatgcgatggctgatgtgtacgccactattgcgatggcaaagctggtaaaaacgcgtcagccacgcctgtttgattatctctttacccatcgtaataaacacaaactgatggcgttgattgatgttccgcagatgaaacccctggtgcacgtttccggaatgtttggagcatggcgcggcaataccagctgggtggcaccgctggcgtggcatcctgaaaatcgcaatgccgtaattatggtggatttggcaggagacattagcccattactggaactggatagcgacacattgcgcgagcgtttatataccgcaaaaaccgatcttggcgataacgccgccgttccggttaagctggtgcatatcaataaatgtccggtgctggcccaggcgaatacgctacgcccggaagatgccgaccgactgggaattaatcgtcagcattgcctcgataacctgaaaattctgcgtgaaaatccgcaagtgcgcgaaaaagtggtggcgatattcgcggaagccgaaccgtttacgcctagtgataacgtggatgcacagctttataacggctttttcagtgacgcagatcgtgcagcaatgaaaattgtgctggaaaccgagccgcgtaatttaccggcactggatatcacttttgttgataaacggattgaaaagctgttgttcaattatcgggcacgcaacttcccggggacgctggattatgccgagcagcaacgctggctggagcaccgtcgccaggtcttcacgccagagtttttgcagggttatgctgatgaattgcagatgctggtacaacaatatgccgatgacaaagagaaagtggcgctgttaaaagcactttggcagtacgcggaagagattgtctaatttgaagcctccgccgctggtacggcggaggacaatgttgagtcaggctttttgaacggtgatgctccacgctgcatcgccaatctgctgataatcggtgatggcatgtccttcttctgccgcccactgtgggattgcttcagttgcctgggtgcaatcaaactcaatcactaactcatcgccgctgaccatttctgccagagctgcttttgcttctatgagtggaaacggacagacctgcgtcaccacatccagctttttaatcaccatctttacaccttacttaatttgccgcagcagttgccagtcgcgccttacgctgcggtcgaacatacacaagccaggacgcagtccagactccgagaatcataaatacaaggccaatccagccctgccaggtcatcattgcagtcataaccagtccattaccgatagagcaaccacctgcaatactggcaccgaagcccatcagtacaccacctaacccgctacgtaatgttgtttgtgcatcagctgcgcgaacgcggaactcacggctcgctttggctgcaataaaactccccacgaagatccctaacaccaggaaaacgccccagttaatgtatttcatgtcacccgcgaccagaaattgcagaatattggccgttggggaagtgattcctaacccaaacatgcgtccggttgcttcactcaggggccaggctaaaagcgcaatcaaaccgatgagtacagctgtgacaaagggatgccagcgtttttcaaacagaatatgagcgatcccggttcggcgcggcggtaaggtcgcgactttgagttttggcttcttcaactctttcatcaccacccagagcgttatcaccagcaaaacggcaaccaacggccacacagacaaattaaaagtctcagcaatagagttatgttcagtactgtagtgctgcaaggtttgatttaaaccactggcatgtggagaacgcatcaccgcactcatcaccatataagtgaaaagcgcgatccaactgccgatcaatccctcacccgcgcgataccaggtcccggtggcacatccacccgccagaacaattcccagcccgaagatatacccacctataacagtaccaagccacgggaacgccccggcttcgtaagtcagtaggcccgcctgaattaacgcaaaaacccccacgctttgtacgctaattgcaatcagcaaggcgtaaaacatgcgattatttttcacgatatacatatcgcgaaaaccacctgtcaggcaaaaacgcccacgctgcatgacaaatcccagcagagcaccacaaattagcccgcttaatatcatactaaacataaattaattaaccagatgaatgttaatgaggaaattattcatgactggtggaatgcagaccaataaccaaattctctaaattagaacaaatggttattaatgaggagttcgatacaaaagaataaaaaaaccggagccaaatgttcattcgactccggtttattattagaaaagatgattatgctacgtcttcgtactgcggaaccggattacggaagctcttggtgacgcaagccaggtaaatcagaccgatagcagcccagatcagacccagaaccatactgctttcttccaggttaacccacagcgcaccaacggtcagcgcaccacacatcggcaggaacagatactggaagtgatctttcagcgtcttgttacgcttctcacggatccagaactggctgatgacgctcaggttaacgaaagtgaacgccaccagcgcaccaaagttaatcagcgccgttgccattaccaggtcgaagttgattgccagcagggcaatcgcgccaaccaggatgatgttcatcgccggagtacgccatttcgggtgtacataaccgaagaagcttttcgggaatacgccgtcacgacccattacgtacatcagacgcgctacgcctgcatgcgccgccataccggacgccagtacggtaatggtggagaagatcagcgcgccaacctggaacgctttacccgcaacgtacagcatgatttcaggctgactcgcatccggatctttaaagcgagagatatccgggaagtacagctgcaggaagtaagttgcaaagatgaagatcatgccgccgatcagcgcggtcaggaaaatcgcacgcgggatcacgcgctctgcatctttggtttcttcgctcaggttgctgatgccgtcaaagccggtaaaggagaagcacaggattgtcgccccggtaatcatcgggataacatgcgcatcgccagaccagaatggacgagtgctcgccagcgtaccagcgccttcaccttcaaatacgccataaacaaccatgcccagaatcaccgcgatcagcactacctgcaacacgacgattacagtgttgaagttcgctacggatttcagactacgcaggttaaaggcggtcataaaggccaccagcgccaccacaaacatccagcttgggatggaaggcaccagagcttcaaaatagattttcgccagtagaatgttgatcatcggcgcgaacagatagtcgagcagagaagaccaacccaccataaagccgacagtcgggctaatggatttctgggcgtaagtgtatgcagagccagcagaaggatagcggcgaaccagcttcccgtagctcagagccgtaaacaggatcgcaatcaatgcgaacgcataggctgtcggcacatgaccatccgtgaggccactaacgataccaaaagtatcaaacagcgtcatcggctgcatataggcaagacccatcattacaaccggaactaacgtaagcgttttacgcaattccacgcgagaggtgtttggagtaacgttatggctcatggtcattctcctttacggtgataaccgtcgcgtaagcaaaaaattgccccatttttttggattcctcagcgacaacaactgtcgatttttagtaaatatctatccggtacgaagcccggcctcttggtatgaatgattggtttgaagcaaaaaataaccgacgctgatgaaacgtcggtttttagtcattttttgacagcggcgcattgtgcctaaatgggggggaaatgacaagagaatgagaggcttgtcagaataatttttctttaaatggcactttttccgtcatcagattttgcataaacaccggcgatcgcactatttgctaaaatttcatcccgccaccagccactggcaagtcctgcggtctgttcgttccagccaatccagacgggttcaaagagagtttgggcgaccactttcttctcgattaacgcgccactatcgagaaaacgttgcgccagataacggggtaaatagccgcagccgaggccgctaatttgcagctccagtttggttttaaaatcgaaaacggtaatggcttcttgttcgtcgagaagttgacttgccgtagaagcgcctgcctgcgcagtatcccccaccacaatcgcccgatatcgcttaataatacgacgatttaacggctcttcttccagggctaacggatgatgaggcgcgaccgcaaagacttgttccagatcgcccaaccgactaaaaccaaactcactggaagatggtggctcatgcatcgcgccaacaataatatccgctcgcccctgagtcagggcatcccaactaccaccgagtacgccattgataaacttcaggcgcgtcacgctatgatgttgataaaaagcttcaatgagtggcgcaagcagagaaaaaggaaacgtgtcgtccacgccaatcaccagctcgttttcccagccttcatgcagtttgatcgcctgcttttccagttcccgcacggtatgcagaacttcccgccctttctctaataacatttttccggtgcgggtgaatttagcgcggtgtccgctacgatcaagcaattgaatattaaggtcgctttccagcttgtgaacggtgtaactcagagcggacggcgtcttgtagagtttggcgctcgccgccgcaaaactgccttctttttctaaggcatcgaggatcatcaacacatccagcagtggtttcatacacgcccccttgcagtgcatgcggcgtcctgctggcgtgatcgtttactccagcggcattaccagcggatcgggatactggtattcaaatcccagttcattacaaatccgactgccatcaataatcttacctttgccgctgtccagactatttctgaactgcggaggttccagccccagtaaacgggccatctgcggatagaaaacattacgcgcagggtgagctggcgcacatatattatagatgtgtccgcctttaggtgcctgtaacaacagagtgatagcgccaataacatcttctaaatggactaaattaacaccatgttcaccatcaggcgcggtttttccggcaaagaagcgtccgggatgacgtcccggtccgaccaggcccgcaagacgcagaatatcgacgctagtaccgggtaaattgtgcagccagtcttcgagttcttctaatactcgtccactgttggttactggattacgcggggtggtttctttcaccgtgccttgcgcgtcgccatagacagatgtactgctggtaaaaataatgcggggaatacgatgggccagcgcgctatccactaactcttgtaccgcttgtaaatagaactcatcgccggggccgctacgacgtgccggaagcgtaatgaccagcgcatcggcatccatcagggcatccagatcgtcagaatcgcaaactagctcaggctccatgcgaagcagatagctatcaatgccactcattcgggccgcttcgacaccatcttgtgtggttttactcccggtgacttgccagcctcgcgcactaagactcatcgccagcggcatgcctaaccaccctaacccgacaattgcgacctttttcatccgttatctcctgatacaccttagatctataaggctacgctagcgtatcaaaactgacaattcattctatgaatgaatctgttcaataatgataacgacatgctgcaatgagcagactatcgtcggtaaccgcgtataccagacggtgctcctctgtaatgcgtcgggaccagaaaccactcaaattatgtttcaggggttctggcttccccttaccttcaaatggcgttctgcgggtatctttgataagttcattgatctttttaacaattcgcttatctgtttcctgccagtacagataatcgtcccaactttcctcagaccagattagtttcactcaatgatgtccttttccgttcctttgccacttttcaggctatcgatactgtccatcaatctccgggcgttagcgggggagcgcagtagataagccgtctcttccaggctgttgtattcttcgagactcatcagaacacaagcctctccattctgacgagtaataaggatcggggcatgatcttcaacggctttcatcattgttgcgctcaaattctgacgcgcttcgctgtagctaattgtacgcatgtcaatctcctcttttgtacagttcattgtacaatgatgagcgttaattaactatttattaattagtttgtagatcaaggtattgtcagtgagacgaaaatccaggcttcgctatttttggtgccatcagctaagaggacagtcctcttagccccctcctttccccgctcattcattaaacaaatccattgccataaaatatataaaaaagcccttgctttctaacgtgaaagtggtttaggttaaaagacatcagttgaataaacattcacagagacttttatgacacgcgttcaatttaaacaccaccatcatcaccatcatcctgactaatctttcaggcgatgtgtgctggaagacattcagatcttccagtggtgcatgaacgcatgagaaagcccccggaagatcaccttccgggggcttttttattgcgcggttgataacggttcagacaggtttaaagaggaataacaaaatgacagacaacactcgtttacgcatagctatgcagaaatccggccgtttaagtgatgacagtcgcgaattgctggcgcgctgtggcattaaaattaatcttcacacccagcgcctgatcgcgatggcagaaaacatgccgattgatattctgcgcgtgcgtgacgacgacattcccggtctggtaatggatggcgtggtagaccttgggattatcggcgaaaacgtgctggaagaagagctgcttaaccgccgcgcccagggtgaagatccacgctactttaccctgcgtcgtctggatttcggcggctgtcgtcttagcctggcaacgccggttgatgaagcctgggacggtccgctctccttaaacggtaaacgtatcgccacctcttatcctcacctgctcaagcgttatctcgaccagaaaggcatctcttttaaatcctgcttactgaacggttctgttgaagtcgccccgcgtgccggactggcggatgcgatttgcgatctggtttccaccggtgccacgctggaagctaacggcctgcgcgaagtcgaagttatctatcgcagcaaagcctgcctgattcaacgcgatggcgaaatggaagaatccaaacagcaactgatcgacaaactgctgacccgtattcagggtgtgatccaggcgcgcgaaagtaaatacatcatgatgcacgcaccgaccgaacgtctggatgaagtcatcgccctgctgccaggtgccgaacgcccaactattctgccgctggcgggtgaccaacagcgcgtagcgatgcacatggtcagcagcgaaaccctgttctgggaaaccatggaaaaactgaaagcgctgggtgccagtagtattctggtcctgccgattgagaagatgatggagtgatcgccatgagctttaacacaatcattgactggaatagctgtactgcggagcaacaacgccagctgttaatgcgcccggcgatttccgcctctgaaagcattacccgcactgttaacgatattctcgataacgtgaaagcacgcggcgatgaggccctgcgggaatacagcgcgaagtttgataaaaccacggttaccgcgctgaaggtgtctgcagaggagatcgccgccgccagcgaacgcctgagcgacgagctaaaacaggcgatggcggtggcagtaaagaatattgaaaccttccacactgcgcaaaaactgccgccggtagatgtagaaacgcagccaggcgtgcgttgccagcaggtcacgcgtccggtagctagtgttgggttgtatattcctggcggctccgccccgctcttcagtacggtattaatgctggcgactccggcgagtattgcgggctgtaaaaaagtggtgctgtgcagtccgccgccgattgccgatgagatcctttatgcggcgcagctgtgcggtgtgcaggacgtgtttaacgtcggcggcgcacaggccattgccgcactggcgtttggtacggaatctgtgccaaaagtggacaaaatcttcgggccgggtaacgcctttgtcaccgaagcgaaacgtcaggtgagccagcgtctggacggtgcggcgatcgatatgcccgcaggcccgagcgaagtgctggtgattgctgacagcggcgctacgccggatttcgtggcttctgatttgctctctcaggctgaacacggcccggacagtcaggtgattttactgacgcccgctgctgatatggcgcgtcgcgttgccgaggccgtcgaacgccaactggcagaactgccgcgtgccgaaaccgcccgccaggcactgaacgccagccgcctgatcgtgactaaagatttagcgcagtgcgtggagatctccaaccagtacggcccggagcacctgatcattcagacccgcaacgcccgtgaactggtcgatagcatcaccagcgccggtagcgtatttcttggtgactggagtccggaaagcgcaggtgattacgcctccggcaccaaccacgttctaccgacttacggttacaccgccacctgttccagcctcgggctggcagatttccagaagcgcatgaccgtacaggaactgagcaaagaggggttctccgcgctggctagtaccatagaaacactggccgccgccgagcgcctgaccgcccacaaaaatgccgttactttgcgtgttaacgcccttaaggagcaagcatgagcaccgtgactattaccgatttagcgcgtgaaaacgtccgcaacctgacgccgtatcagagcgcgcgtcgtctgggcggtaacggcgatgtctggctgaacgccaacgaataccccactgccgtggagtttcagcttactcagcaaacgctcaaccgctacccggaatgccagccgaaagcggtgattgaaaattacgcgcaatatgcaggcgtaaaaccggagcaggtgctggtcagccgtggcgcggacgaaggtattgaactgctgattcgcgctttttgcgaaccgggtaaagacgccatcctctactgcccgccaacgtacggcatgtacagcgtcagcgccgaaacgattggcgtcgagtgccgcacagtgccgacgctggacaactggcaactggacttacagggcatttccgacaagctggacggcgtaaaagtggtttatgtttgcagccccaataacccgaccgggcaactgatcaatccgcaggattttcgcaccctgctggagttaacccgcggtaaggcgattgtggttgccgatgaagcctatatcgagttttgcccgcaggcaagcctggctggctggctggcggaatatccgcacctggctattttacgcacactgagcaaagcttttgctctggcggggcttcgttgcggatttacgctggcaaacgaagaagtcatcaacctgctgatgaaagtgatcgccccctacccgctcagcacgccggttgccgacattgcggcccaggcgttaagcccatagggaatcgtcgccatgcgcgaacgggtagcgtaaattattgcagaacgcgaatacctgattgccgcactgaaagagatcccctgcgtagagcaggttttcgactctgaaaccaactacattctggcgcgctttaaagcctccagtgcggtgtttaaatctttgtgggatcagggcattatcttacgtgatcagaataaacaaccctctttaagcggctgcctgcgaattaccgtcggaacccgtgaagaaagccagcgcgtcattgacgccttacgtgcggagcaagtttgatgagtcagaagtatctttttatcgatcgcgatggaaccctgattagcgaaccgccgagtgattttcaggtggaccgttttgataaactcgcctttgaaccgggcgtgatcccggaactgctgaagctgcaaaaagcgggctacaagctggtgatgatcactaatcaggatggtcttggaacacaaagtttcccacaggcggatttcgatggcccgcacaacctgatgatgcagatcttcaccagccaaggcgtacagtttgatgaagtgctgatttgtccgcacctgcccgccgatgagtgcgactgccgtaagccgaaagtaaaactggtggaacgttatctggctgagcaagcgatggatcgcgctaacagttatgtgattggcgatcgcgcgaccgacattcaactggcggaaaacatgggcattactggtttacgctacgaccgcgaaaccctgaactggccaatgattggcgagcaactcaccagacgtgaccgttacgctcacgtagtgcgtaataccaaagagacgcagattgacgttcaggtgtggctggatcgtgaaggtggcagcaagattaacaccggcgttggcttctttgatcatatgctggatcagatcgctacccacggcggtttccgcatggaaatcaacgtcaaaggcgacctctatatcgacgatcaccacaccgtcgaagataccggcctggcgctgggcgaagcgctaaaaatcgccctcggagacaaacgcggtatttgccgctttggttttgtgctaccgatggacgaatgccttgcccgctgcgcgctggatatctctggtcgcccgcacctggaatataaagccgagtttacctaccagcgcgtgggcgatctcagcaccgaaatgatcgagcacttcttccgtagcctcagttacaccatgggcgtgacgctacacctgaaaaccaaaggtaaaaacgatcatcaccgtgtagagagtctgttcaaagcctttggtcgcaccctgcgccaggccatccgcgtggaaggcgataccctgcccagcagcaaaggagtgctgtaatgaacgtggtgatccttgataccggctgcgccaacctgaacagcgtgaagtctgccattgcgcgtcacggttatgaacccaaagtcagccgtgacccggacgtcgtgttgctggccgataaactgtttttacccggcgttggcactgcgcaagcggcgatggatcaggtacgtgagcgcgagctgtttgatctcatcaaagcctgtacccaaccggtgctgggcatctgcttagggatgcaactgctggggcggcgcagcgaagagagcaacggcgtcgacttgctgggcatcatcgacgaagacgtgccgaaaatgaccgactttggtctgccactgccacatatgggctggaaccgcgtttacccgcaggcaggcaaccgcctgtttcaggggattgaagacggcgcgtacttttactttgttcacagctacgcaatgccggtcaatccgtggaccatcgcccagtgtaattacggcgaaccgttcaccgcggcggtacaaaaagataacttctacggcgtgcagttccacccggagcgttctggtgccgctggtgctaagttgctgaaaaacttcctggagatgtgatgattattccggcattagatttaatcgacggcactgtggtgcgtctccatcagggcgattacggcaaacagcgcgattacggtaacgacccgctgccgcgattgcaggattacgccgcgcagggtgccgaagtgctgcacctggtggatctgaccggggcaaaagatccggctaaacgtcaaatcccgctgattaaaaccctggtcgcgggcgttaacgttccggtgcaggttggcggcggcgtgcgtagcgaagaagatgtggcggcgttactggaagcgggcgttgcgcgcgtagtggtcggctccaccgcggtgaaaagtcaagatatggtgaaaggctggtttgaacgcttcggtgccgatgccttagtgctggcgctggatgtccgtattgacgagcaaggcaacaagcaggtggcagtcagcggctggcaagagaacagcggcgttagtctggaacaactggtggaaacctatctgcccgtcggcctgaaacatgtgctgtgtaccgatatcagccgcgacggcacgctggcaggctctaacgtctctttatatgaagaagtgtgcgccagatatccgcaggtggcatttcagtcctccggcggtattggcgacattgatgatgtggcggccctgcgtggcactggtgtgcgcggcgtaatagttggtcgggcattactggaaggtaaattcaccgtgaaggaggccatcgcatgctggcaaaacgcataatcccatgtctcgacgttcgtgatggtcaggtggtgaaaggcgtacagtttcgcaaccatgaaatcattggcgatatcgtgccgctggcaaaacgctacgctgaagaaggcgctgacgaactggtgttctacgacatcaccgcttccagcgatggccgtgtggtagataaaagctgggtatctcgcgtggcggaagtgatcgacattccgttttgtgtggcgggtgggattaagtctctggaagatgccgcgaaaattctttcctttggcgcggataaaatttccatcaactctcctgcgctggcagacccaacattaattactcgcctggccgatcgctttggcgtgcagtgtattgtggtcggtattgatacctggtacgacgccgaaaccggtaaatatcatgtgaatcaatataccggcgatgaaagccgcacccgcgtcactcaatgggaaacgctcgactgggtacaggaagtgcaaaaacgcggtgccggagaaatcgtcctcaatatgatgaatcaggacggcgtgcgtaacggttacgacctcgaacaactgaaaaaagtgcgtgaagtttgccacgtcccgctgattgcctccggtggcgcgggcaccatggaacacttcctcgaagccttccgcgatgccgacgttgacggcgcgctggcagcttccgtattccacaaacaaataatcaatattggtgaattaaaagcgtacctggcaacacagggcgtggagatcaggatatgttaacagaacaacaacgtcgcgaactggactgggaaaaaaccgacggacttatgccggtgattgtgcaacacgcggtatccggcgaagtgctaatgctgggctatatgaacccggaagccttagacaaaaccctcgaaagcggcaaagtcaccttcttcagccgcactaaacagcgactgtggaccaaaggcgaaacgagcggcaatttcctcaacgtagtgagtattgccccggactgcgacaacgacacgttactggtgctggcgaatcccatcggcccgacctgccacaaaggcaccagcagttgcttcggcgacaccgctcaccagtggctgttcctgtatcaactggaacaactgctcgccgagcgcaaatctgccgatccggaaacctcctacaccgccaaactgtatgccagcggcaccaaacgcattgcgcagaaagtgggtgaagaaggcgtggaaaccgcgctggcagcaacggtacatgaccgctttgagctgaccaacgaggcgtctgatttgatgtatcacctgctggtgttgttgcaggatcaggggctggatttaacgacggtaattgagaacctgcgtaaacggcatcagtgagttgcggggtaagcggatgcgatattgttgccgcatccggcaaaaaaacgggcaaggtgtcaccaccctgccctttttctttaaaaccgaaaagattacttcgcgttgtaattgcgtagagcattacgccccagcacaatccccgcgccaaccatgccacccagcagcaccgccagaatcaaggtaattgcctttttcgggctatcacgacgaataggtaacatcggtttcatcacataacggtaagcatgaatatcaagatcatcaacttttaagctttcgatatccagcaggttttgacgagtctgatagtagtttgggctgaacaccaacggacgggtcgcctcatgcttaatcatgctctccagcgcttcgctccccaaaaggaacaacgtatcttgtgtgatatcttcgccagtctgttgaatctgcggttttgtcacctgcgcctgattcgcatactgcaacgcttcctgaatctgacggatacgcagatctttctgctcctgcgcgactacttcctgcgttcttaaagagtcctgcaagtttttccgtcccagagcaatgttgtctttgagatccttttctagctcttgattcactttatcgtcaacttgctgaatgtattgggccaacttcatttgtgcgccctctgcagtttgcccaacataagaaacagtcaatggtaattgctggttcttaacagaaggttcgatggtaagtttttctcgttcttcctgattatccagcgtttctgctaatgcagagaaggcagaactgaagcgaccaattaacgtctcctgcaaatcgcttactttcggtgcagcctgaccatagataacattcatggcattgttatagccagcaatttgccccacgtcgggctgagtgataattgctgtactcgtccatttctccttcgctactgccaaatatccaatagccagggcaatagccacaatgacggaaatgatgattgtcatcttgccacgccacaactgcactagtaaatcaatcaaatcaatctgttccgggtcatggttttgcccagaaacattattattttctactctcatcattaccctaactgacggaaatttccaagtccgcatagtttagcgataatcctcgtgaatgctataggataagtgataaaaataatgaattgttgtgtaagtaacaaaagacaatcagggcgtaaatagccctgataacaagatgttagtcgctgccaaagagatcgcgggtgtataccttatctgccacatccttaagctcttctgccattcggttagagataatgacgtcggcttgttgtttgaaggtggcgagatcacgttccaggcgagagttgaagaaactgtcttctttcatcactggctcgtagatgatcacttcaacacctttcgccttgatacgtttcataatcccctgaatagaagacgcacggaagttatcactaccgctcttcataatcagacgataaatacccaccacttgcggcttgcgactcaaaatggcatcggcaataaaatctttacgcgtgcggttagcatcgacaattgcgctgatcaggttattcggcacagactggtagttcgccagtaactgcttggtatctttcggcagacaataaccaccataaccaaagctcggattgttgtaatggttgccaatacgtgggtcgagacaaacgccttcgattatttgacgggaattcagacctaaactttctgcatagctatccagttcgttaaagtacgccacgcgcatcgccaggtaggtgtttgcaaaaagtttaatcgcttctgcttcagtggagtcggtaaacagcatcgggatattttgcttaatcgcgccttcctgtaacagagcagcgaaacgttctgcgcgttcactacgctcaccgatgacaatacgactaggatggagattatcgtaaagggctttaccctcacggagaaattccggggagaatataatattttcagtgcgatatttcttatgcatcgctgcggtaaaaccaacgggaaccgtacttttgatgaccataaccgcataaggatttatctcaactacgtctttaattacactttctacactggatgtattgaaataattagttttaggatcatagtcggttggagtggcgatgatgacataatcagcatcccggtaggcttcatttttatctaatgtggcattaaagtgtattttatcactttgcaaaaactgctgaatttccttatcaacaataggagatatccgatcattcagcatagcaacgcgactcggtaaaatatctaatgccacaacctcatgattttgtgcgattagaagcccgttactcaagcctacatagccagtaccggaaatggtgattttcatttcatgctctcagaattaacttaactgtgaatcatgatgtttttagcatcctgataagagctaaaagttttaacgctacgttgttcgatggtcaacgcaacgaaaaacaattcagattttctttataagaatagctgatatttattaagttaatattaagcagtgaaatttagtctataagatatttggcaaaaaaaagcccggtgcaatatacgccgggcctcaattttattgttggttaaatcagattaatccagccattcggtatggaacacaccttctttatcaatacgcttataagtatgcgcaccaaaatagtcacgctgtgcctggatcaggttcgcaggcagaacagcagcacggtagctgtcgtaataggcaaccgctgcggagaaggtcggaaccggaataccgttctgtactgcataagcaacgacatcacgcagcgcctgctggtagtcatcggcaatttgcttgaagtacggagccagcaacaggttagcgatctgtggattttcggcataagcatcggtgattttctgcaggaactgcgcacggatgatgcagccagcacggaaaatcttcgcgatttcgccgtagttcagatcccagttgtactcttcagacgcagcacgcagctgagagaagccctgggcgtaagaaacgattttgcccagatacagcgcacgacgaactttttcgatgaactcagccttgtcgcctgctggctgtgcttgcggaccagagagaactttagatgcggcaacacgctgatctttcagagaagagatataacgtgcaaacacagactcggtaatcaggctcagcggttcgccgagatccagcgcgctctggctggtccatttaccggtacctttgttagccgcttcatccaggatcacatcaaccaggtagttaccgtcttcatcttttttggtgaagatatctttggtgatgtcgatcaggtaactgctcagttcaccgttattccactcggtaaaggtctgcgccagttcttcgttggtgaggttcaggccacctttaagcagagaataggcttcagcaatcagctgcatatcgccgtattcaataccgttgtgaaccatcttcacatagtgacctgcgccatcggcaccaatataggtaacgcatggttcaccgtcttcagctacggcggcgattttggtcaggatcggtgctaccaattcataggcttctttctggccaccaggcataatagaaggacctttcagcgccccctcttcaccgccagaaacaccggtaccgatgaagttaaagccctctgcactaagctcacgattacgacgaatagtgtcctggaagaaggtgttaccaccatcaatgatgatgtctcctttatcgagatatggtttgagggaatcaatagcagcatccgtgcctgcacctgctttcaccattaacaggatgcgacgaggcgtttccagagattcgacaaactctttcaccgtatagtaaggaaccagtttcttgcctggattttcggcaatcacttcttccgtcttctcacgggaacggttgaaaatagagacggtataaccacggctttcgatgttgagcgcaaggttgcgtcccatcactgccataccgactacgccgatctgttgcttggacattacatactcctgtcaggtgtgatcaccgcgctgaatgctcgcggcctggaatgttcgcaaataagtatacaaagtacttattaaagtataaatagcttatccatgcttatatgcttacggctttatatgtctccacatgcgatatttcttaaataatgttttattattaccacttttaattcagggataatgtgaggttattaccctcaaataatatgagataaatagtgctgcaacattgcatttttgccccgatttatccatgatcgaattgtgacatttgtcatacaacgaataggttttgtacttactatggaatggattgccgatccgtctatctgggccgggttaatcacgctgattgtgatcgaactggtcctcggcattgataacctggtctttattgccatcctcgccgaaaaactaccgccgaagcagcgtgaccgcgcacgggttaccgggctgctgctggcaatgttaatgcgcctgttactgctggcgagtatctcctggctggtcaccctgactcaaccgctgttcagcttccgcagctttacctttagcgcccgcgacttaatcatgctgtttggtggtttcttcctgttgttcaaagccacgatggagctgaacgaacggctggaagggaaagacagcaataatcccacacaacgcaaaggtgcgaagttctggggcgtggtgacgcaaattgtggtactggacgccattttcagtctcgacagtgtgattaccgccgtcgggatggtcgaccatttactggtcatgatggccgccgtggttatcgctatcagcctgatgttgatggccagcaagccgttaacgcaatttgttaacagtcacccgacgatcgttattctctgcttaagcttcctgttgatgattggctttagcctggtggcagaaggtttcggcttcgtcattccgaaaggctacctgtacgctgccattggtttcagcgtgatgatcgaggcgctcaatcagttggctatctttaaccggcgacgttttctttccgctaaccagacgctgcgccagcggactaccgaagcggtaatgcgcctgcttagcgggcaaaaagaagatgcggaactggacgccgaaaccgcgtccatgctggtggatcatggtaaccagcagatctttaatccgcaggaacggcggatgattgagcgggtacttaatcttaaccagcgtaccgtcagcagcattatgacgagccgccacgatattgagcatatcgatctcaacgcgccggaagaagaaatccgccagttgctggagcgaaatcagcatacgcggctggtggttaccgacggtgatgacgcagaagatttgctcggtgttgttcacgttatcgacctgctacaacagtctctgcgcggcgaaccgctcaacctgcgggtgttgattcgccagccgctggtgttcccggaaaccttgccgttgttacctgccctggagcagttccgtaatgcccgcacgcactttgcttttgtggtggatgagtttggcagcgtggaagggattgtgacattaagtgacgtcactgaaaccattgccggtaacttaccgaacgaagtggaagagatcgacgcccgccatgatattcagaagaatgcggacggttcctggacggcgaatggtcatatgccgctggaggatctggtgcaatatgtgccgctgccgctggatgaaaaacgtgaatatcacaccattgccgggctgttgatggagtatttgcagcgtattccaaaacctggcgaagaagttcaggtgggggattatttgcttaaaacgttgcaggtagaaagccatcgcgtgcagaaggtgcagattataccgctgcgtaaggatggcgagatggagtacgaggtgtgatggtatcggtcattttacccaatagccgaaaggaataagatgagggaaccgcgccatcggcgatttaccgccgggagcccgggttgccagggtggtggagattgagccaccctggcacgttcaccggcttgagcgttccatagtagcgaggaacatcaagtgaacggaacagccttcgatcttacatattcagaatataatgatgccgccacgaacgcctgatgcgacgctttacgcgtcttatcaggcctacaggactggtcacctggtaacttacatcttctccagcaacttcttcacatctttgccattacgggaatctttattccgctcggcccagtcattcaggcgacgtttcgcttcgtcctgtagatgtttgcgcagtaactgatccacttgcaggctgtaattgagttgctgccagttgccataaacccgcagcggtactggcgtttctttcaggaaatcaatcagtttgctttccccgttccagccacccacgacccgaatatcaaactgggtgtcgcaggtttgatctgccagattcaacatgccttcccctgtcagcgccagcacagggctttgaccttgcatgtcgtttaacgtcacgacgccatccttcaacgtcaaatcggtggtaaagcggtcaagccgcgtcacgttatcaaagttttcagcggccttcacatcaccgccattacgctctaccgcttgctgaatcatctgctggaagttcatcccttccatgcgcgtgtcggtcatttcgacatgtgcctgtccttgccagttgtggcggaatgcgtcggcatctatgtcagcaccggagaaatcaccagccagactcatttttccggtcaagctaatcggatagttaaacgccttcagaatggtaccaatctcaacgttttccagccgtggctggaagtttatccgcggatttatacttgtcgcgtccagcgtgcccggcagactaacctgtccaccgttaagtttgccctgcagttgagtaatttccagcaaaccgctcttgttggtcatttgcgtggcaacatctgtaaaattcattccgcgccagcgcacgttactggcctgcaacaaaatatcagccgtaaagccttgcagtccctgataggccggttcatcaatacggctagaaatgaccgggcgcggcaacgtactttggctctgcccctgctgcgcggcaccgttttcaccattcgcggtttcattaagcgggatgaggttgtcaagattcagttgcgggaattgcagcctcagctgccattccggtttctctgtcagcgtaacctgtgcttgcccgcttagcgtactatcattggcggtcaaactaatttggttaaaactaaggcgtttatgactctcctgccactgggcctggaaactcccctgcccctgaataccttgttttggtaaatcggcaccctgcaactgccagttaatttgttcaatagccgccgttaaatcatgcggataatcagaagcatctaccgtaccgttaagggatatcgtgagatcgcgctgatcgcgattaacccgcccggagaactcaaaactaccacgatgttggggatcttgttccatttgcaggcgaatattgcggattgtcacctgctcgtcatcttcatgctggaacaccagcacgctgtccgccaccttaagactggatatatcaaagctccatccgcgatcgtcactcagatccggcaaggtattgtcgcgcggtgcaaccggagcgtcttcactgcgcaccgcttccgtctgcggcgtcagttggatcactgccccttttagcatcacctgcttaacgctcagttgatgactcagtagtggtaaaagcgccacgtccagacgcatgttgtcggcgcgaaccagtggctggcttgcgccctgggcggtgagagacattcgcccggagaggatactaagctgcggccagacgtgccaacgcagtggcccgtcgagctgcaattgataaccgctacgtgcagcaacttgcttgaccatatagtcgcggaaatcattcggattcaccagcaacactaacgcagataacccggccaccagcacgaccaggagtatcatcagcgtcgtcagaaatcgtctcatggtatcctcaatgggcctgaattagtctttatcgattcggctggctaccgcgccctgctggttgcgatatttcgcatcttcacggcggttgtaaggtcgcaccgccgggccggaaagcggctcaaagctcagcgcaccaattaacatgcccggacgcagcgccagcggcagcttaccggagttgtagaactccagcacaatgcaaccagaccagcccggatcgatgcggtgcgcggtgacgtgcaccatcagccccagacgcgccagactggaacgcccgtccagccagcccaccagatcggctggcagcgtcacgctctccagcgtcaccgccagcgccagctctcctgggtgaagatagaacgcctcgccctcgtcgagaacgatctcatcgctcatcacgcggtcaagcgcggcgctcacttcatctttgggaccgctcagatcgataaacgctgccgtgtgaccacggaaggtacgaaatttattgcccaggcgtacatccaccgtcgcgccgttaatacgctccactggcggacgtgggttgatgctcaaacggccttcatcaagccaggcttcaatatctcggtcacacagacgcatggcattttctcctttcgcgcatcactcccttaacgccaattacgtcaagggcatactaggttatcactgaacggtacacaatttatcaagcttattcaaagaactgacttattttcgctttcaatatatcgatcgcgatgcggtttttcccgccgcgcggcacgataatgtccgcatattgtttagaaggctcaatgaattgcaggaacatcgggcgcacggttttttgatattgcgccatcacactatccatactacgcccacgctcgttaacgtcacgcttgatgcggcgcatcaggcagatatccagcggggtatcaacgaaaatggagaagttaagttcgtcacgcaaacgcgcatccgtcagcaacaaaatgccttcgagaatgatgaccttcttcggctcaaccgtcaccgtttctttcatacgcgtatgttcaacatagctgtaaaccggcaggtcaattgcgctgccgcgtttcaacgcttgtaaatgctcaagcagcagactgtgatccatcgcgctgggatggtcgtagttggtcttaacgcgttcttccatgctcagatggctttgatctttgtaatagcagtcttcgggaattacgccgatgtgttcatcaccgacttgctcacgcaattcacgataaagggtactggcaataagactcttgccggaagcgcttgcgccagcgataccgataatgacgcactgatgagactgatcagtcatatatttagcgacctgattaacctggatgttaggaagggggcgacgaagcgccaaacgcggcaattatagggatttcatccgtctgataccagtcgaatagcgttgccgcgcgctcagagttaattgttgacaaagaattcccgggggcaaattacgttgatcagttttatgtaaggtaaaaaatgttaaacgcagttgcgcaaattatccgcctttacgtcactttatgagcaattcgcatataaaatgtaaaacttttgtactagcataaacacagaaacgaatactggcgaccaggtcttgcggataaagcggtaatgagcaaacaaagtcagcatgtattaattgccctgccccacccgctgcttcacctggtcagtttaggtttagtcagctttatctttacccttttcagccttgagcttagccagtttggcacccaactcgccccactgtggttcccgacgtccatcatgatggtggcgttttatcgccatgccgggcgcatgtggccgggaattgcgctgagctgtagcctgggaaatatcgccgcatccatcctgcttttttccaccagcagcctgaacatgacctggacgaccatcaatattgttgaagccgtggtcggggcagtgctgctacgtaaattgctgccgtggtataaccccttgcaaaatctggctgactggctgcgtctggcactcggcagcgccattgttccgcctctgttggggggtgttctggttgtcctgctgacgcccggagacgatcctctcagggcatttttgatatgggtactgagtgaatccatcggcgctctggcactggtgccgctgggattgttatttaaaccacactatctgctgcgccatcgcaacccacggttgctttttgagagcctgctcacgttagccatcacactgacgttaagctggcttagcatgctgtatctgccgtggccttttactttcattattgtgctgttgatgtggagcgccgtgcgtctgccacgaatggaagcctttttgatcttccttaccacggtgatgatggtgagcctgatgatggccgcggatccccccctgcttgctacgccgcgtacgtacctgatgagccatatgccgtggctaccgtttttgctgatcctgctgcccgccaacatcatgaccatggtgatgtatgcctttcgtgcggaacgcaaacacatttccgaaagcgaaacccactttcggaacgcgatggaatattccgctatcggtatggcgttagtgggcaccgagggacaatggctgcaaaccaacaaagcgctctgccagtttctcgggtacagtcaggaagagctgcgcggactcacctttcagcaactgacctggccggaggatctcaataaagatctccaacaggttgaaaagctgataagcggtgaaataaacacctatagtatggaaaaacgctactacaaccgcaatggcgatgttgtctgggcgttgcttgccgtcagtctggtgcgccacacggatggcacgccgctctattttatcgctcagattgaagacattaacgagctaaaacgcaccgaacaggtcaatcagcaactgatggagcgcatcactctggctaacgaagcgggcgggattggcatctgggagtgggagttgaagccgaatatttttagctgggataagcggatgttcgagctgtatgaaattcctccacatatcaaaccgaactggcaggtgtggtacgagtgcgtgctgccggaagatcgccagcatgccgaaaaagtgattcgtgatagcttgcaaagtcgcagcccctttaaactggaatttcgcattaccgtaaaagacggtattcgccatatccgcgccctcgccaaccgggtactgaataaagaaggcgaagtcgaacgtctcctcggcatcaatatggatatgaccgaagtgaaacagcttaacgaggcattgtttcaggaaaaagagcgcctgcacattacgcttgattccatcggtgaagccgtggtctgtattgatatggcgatgaaaattacctttatgaatccagtggcggagaagatgagcggctggacgcaggaagaagcgttaggtgttccgctcctgacggtgttgcatattacttttggcgacaacggaccattaatggagaacatttacagtgccgacaccagtcgttccgcgatcgagcaagatgtggtgttgcactgtcggagcggcggcagttacgacgtgcattacagtattacgccgttaagtactctggacggcagcaatattggtagcgttctggtgattcaggacgttaccgaaagtcgcaaaatgctgcgccagctgagctacagcgcctcccatgatgcactgacgcatctcgccaaccgcgccagttttgagaaacaactgcgtatcctgctgcaaacggtaaacagtacacatcagcgacatgccctggtgtttatcgatcttgatcgctttaaagcggtgaatgacagcgccgggcatgcggcgggtgacgctttgctgcgcgaactggcgagcttaatgctgagtatgctgcgttccagcgacgtgctggcgcgactcggtggggatgaatttggtctgctgctaccagactgtaatgttgaaagcgcgcgttttatcgctacacgcattatcagtgccgtgaatgactatcactttatatgggaaggccgtgtgcatcgggtaggtgccagtgccgggattaccttgattgatgacaacaatcatcaggcggcagaagtgatgagccaggctgatatcgcctgttatgcctccaaaaatggtggccggggccgggtgacggtttacgaaccgcagcaagctgccgcacatagcgaacgggcggcgatgagccttgatgaacagtggcggatgattaaagagaatcagttgatgatgctcgcccacggtgtcgctagcccacggatcccggaagcgcgtaatttgtggctgattagtcttaagctctggagttgcgaaggcgagattattgatgaacaaacatttcgtcgtagcttcagcgatccggcgcttagccatgctcttgaccgccgggtattccacgaatttttccagcaggccgcaaaagcggttgccagtaaaggcataagcatctccctccccctttccgttgccggtttgagtagcgccacgctggtgaatgatctgcttgagcagctggaaaatagccctctaccaccacggttattacatctgattattccggctgaagcgattttagatcacgcagaaagcgtgcaaaaactgcggctggcgggatgtcggatagtgctcagccaggtgggccgcgatctgcaaatcttcaacagcctgaaagcgaatatggcagattacctgctacttgatggtgagttatgcgccaacgtgcagggtaatttgatggatgagatgctgattacgattattcaggggcacgctcagcgactcgggatgaaaaccatcgccgggccagtcgttttacccttagtgatggatacgctttctggcatcggcgtcgatctgatttatggtgaggtgattgccgatgcccaaccgctggatttgctggtgaatagtagttatttcgcgattaactgaggcgtgcttccccatcgcctgatgcgacgctaacgcgtcttatcatgcctacaaatcgctcattccccaggccggataaggcgctcgcaccgcatccggcgaccaacgtcatgcttcgtctggttgccagccttccgtataccagatatgcaacagcgcataagaacgccagggcttccagcgctcggcataacggcggatttgcgccggtgtcattcccggaaatcgctgtttaatcagataatcatccggcaggaaaacatctttcgcctgccagccacgcaaagcaaaataattcgccgtccagcgcccgatacccggaaaagtttgcagcgttttcatcgcctgctccacatcgcccggtattgtcattggtaaggtgccctccagcgccgcatttgccagatgaatcagcgcctctgcccgtttcaacggcatacctaacgcttttaatgcctgcgggtctgctgctgccagccgctgaggcgtcgggaagcagatatactccggaaaatcatccagccgttcgccataaagctgtgccactctggcggtcaattttgccgccatcgccacgctcaccagttggcctaaaatcgcccgcacgccctgctcaaaagcatcaacacagccgggtaaacgcaatccgggccgcgccgcgcctaacctgcccaacgcaccgttaacaatttgtgggttacattgcagatcaaacaggcggctcattttcgccagacactctgcggcaacaggttctaaacctgcacttaaatttatgtgcagagtatggcgggctatatccggaatagcagtcaccacgccgcgatattcgcccaccgccagactacgggcataataactgtccgcgaccgtttccacactgctcaccgcacgggcggcgagaaatcccaacatccagctccagtcatacggcggctgccagttcagggtatacatcgcatctccttattcatccgctttcagcataaacgttattcagacgctgcgctttgctttcatattccggttgtcgcgacggcaacatttcgctaaagtcacgccccttcttcaccggcatggggattatttcgtgtttattggttttgattacggtacagcaaactgtagtgtggcggtcatgcgtgacggtaaaccgcatttgctaaaaatggaaaacgacagcacgctgctgcctagtatgctttgcgcgccaacgcgtgaagcggtaagcgaatggctgtaccgccatcatgatgttccggcagacgacgatgaaacgcaggcgctgttacgtcgggcgattcgttataaccgcgaagaagatatcgatgttacggcgaaaagcgtgcagttcggtctttccagtctggcacagtacattgatgatccagaagaagtgtggtttgtgaaaagtccaaaaagcttcctcggtgccagcggcttaaaaccgcagcaggtagcgctgtttgaggatctggtctgcgcaatgatgttgcacattcgccagcaggcgcaggcacagctgccagaagcgattactcaggcggtgattggtcgtccgatcaacttccaggggctgggcggtgatgaagcaaacacccaggcgcaagggattctggaacgcgcggcgaagcgtgccggattcagggacgtggtattccagtacgagccggtcgcggctgggctggattacgaagccaccttgcaggaagaaaaacgggtgctggtggtggatatcggcggtggtacgactgactgtagtttgctgctgatggggccgcagtggcgtagccgtctcgatcgtgaagccagcctgctgggtcacagtggttgccgtattggcggtaacgatctggatatcgcgctggcgtttaaaaacctgatgccactgctgggtatgggtggcgaaaccgaaaaaggcatcgccctgccgatcctgccgtggtggaatgcggttgccatcaacgacgtacctgcgcagagtgatttctacagtagtgccaacggtcgtctgcttaacgatctggtacgcgatgcccgcgaaccggaaaaagtggccctgttacagaaagtctggcgtcagcgtttaagctatcgcctggtgcgtagcgcagaagagtgcaaaattgctcttagtagcgtagcggaaacccgcgccagtctgccgtttatcagcaatgaactggctacgctgattagccagcgagggctggaaagcgccctcagccagccactgacgcggattctggaacaggtgcaactggccctggataacgcccaggaaaaaccggacgttatctacctgaccggcggtagcgcccgttctccgctgattaaaaaagcgctggcagaacagttgccgggcattccgattgcaggcggcgatgactttggctccgtcaccgccgggctggcacgctgggcggaagtggtgtttcgttaattgaaaaatggctcagcagcggcttaaatctgcctgcgcctgagccagtttttctgctgcctgacgtaacggttccatcaacggcatggtccgtgctggagcatgaaggcggaatcgctgcaactctgtcgcgccgactgtcaacgcgctttccagccgatgtcgtttggcggtcattttcgccattaccgcttgtctgtctgctggcgttatcgcttcattcggcctgaacacaaaacggcgttcacagctcgctttccagtcgataaccgcctgggtcagatggtcgccaaaccctttcacttgcttaacgccacgacgggtaacatctgcggctgtttcaataccaaaagaccgtaacgccgctttacgcgcagggccaacgccgggaatagaggcaacatcaataaaaaatccctccagaaacttctgcttctgccgttcccttgcagtgtcatgaagtgctgccagagcgcgtttctcttcttccggtaacccgagaatttcgtccttcattttttcgagcatcgtccgtttggcgataaaaccttccaggccgcctacctgctggatctggcggactaaatggtcatagtccattttcgcacgattaaatgcctcacggcgttgctgaacttctgctttgtacgctttgcttgtcagactgccaataatccagatagccgccagcacaggaaccaaaataatataacgcggttctgcctgaaggccgcaaagcagcaggcttaatgcactcagtgcgatctcaagcagaatgatgtattcgcgccgtaacaggcctaaaggaagcggcctgccagtcggttggaaatgatcgggtaatggcagttgcaatgctggcggtgctacactcgccatcaccatcgcccagactttcgccagcacaaaattcccgccggtggtaatgacctcttcgccgagatcaataaaatagataacaccttgattatccagcgcacaccacgggcagtcagtcaaatgagcggggtaaacatgcattgcactaacgatacatttctttaactgttggcgtagagagtccagtgccgctacccacgctttagccgtcggacgcccggttgccacgccactttccgtgaatgcctgctgaaacatggcttcaacatcactcggtaacatgcttagcggaatagatcgtggcggcggttttaaaccacgtcgctgattatcactcgcgtaggcataacggaaatgggtaatatccgtctccagcgcattacccgcatcagagataagcggcacaccagaataaggatgccgcccaccaaacaagacgtgaaaaattagcaacgcaaggccaaaattatcgtgattttctgtgcgttcaaaaccgacaaaacttggcaaggtttgtagctctggcggcgtaaaatggctcacgccgacttcgcataaatgcagtgtgccattggcgttaatttgaaaggagtcgctatcaatcagtaccactttgctgtcgcgacctaccataaaactgttctggtttacgtcacccacgacgtgcccgtgctcgtgaaccgtagcaaaagaactagcaatattgcgcgcaacatagagtagaaaatcccacgcacaatgagggtaactctggcgacgatgtgccgggctatagatcatatgaatcggttctttaccagaaacttttggcatcataaaaccgataacttttccgcctcgtccaccgtgaagcgttgcctgcggccaggcgacataattcaacaactgcgcgtcagctgtcgcagccataaaggcaagtttgtcctgttttaaggcgggtggcggcgtgtgataaatcttggcgacgctatcgacaaactcctcgatatcataaaccgcgccttcaccacctttgcccagttcacggccaagagtggtcaattcacctgtgcttgtaaatacttttatatttgttttcataatatttcgcgggtagttatattatatttcaatgaataataacaactaaccattaaaattatttctatatggggaaaacccactcaagaataaaaatgataatgcaattttatcaggatacaattcaatttcggcctgataatgattaacttccacaggtttttgctaactttgactacaaagggattctggagaaaaaatgaaaaagatattacttatgttgagtctgctattttttactaccgcgggctttagtgaagttagcgatacgttagtgacgggaggttatgataaacaagcgatgtctgacgcgattaaacatgcgcggaaagaaaccgataaattcatcgaggttatgaataaaaaagatgccgatactttcgcagtcaaagccccgataaccgatcacggaagaaccgagcatttctggcttacggatgtcacttattctaacggcatgtttattggcgtaatcagcaatgaccctggtattgttacaaacgtagaatatggccaggagtggaaaatcaagaaagaagatattagtgactggatgtatacgcgcggggataaaatttacggcggttataccattgatcctttattggtcacctatccaaaagaagaagccgacgagctaagagcaaaattagttcgctaatcagccgttatatttattgtttaaactggcggttgaattgttgtcttcaaccgccatgagaaactcactctgcccacagcgccagtgccaacgttttatcatcatccgtacgctcgtttaccgccgggctggacaaaaactgctttaacaattcaggtaataaatcgagttgttcctgcgttgctgccgccagtccattgaaaaacggggtaaagaaaggcacatgaggagaattatccagcatatttaacgccagtcgctggataccatccgtaaatgctgcaactttgtgcgcacgcccagtgctggtgagagtttccagtctggaaacggcatcttcgtcggtaatgaagtgcgtcatgttggcatattcacccgccatcggcgtgagaggcaattgcagaccgtgacccaaatctaccaccacgccgccatcgccaatctgcataatcaaggtgccgtcagggctactaatcagtcccagaaatgtgcaggcaaaatcgcgaaccgctaattctttggcttccgcctcggcaaaaagtcgttgacgaatggtcagtaccatatttgtggcgaggacatcattaagccccaattccccgccctgcactttttggctcatataagccatcgcttcattgacggcgagcatcgcgccttcgccaccctggctgacactgcctgcgccatcagcgacaaatacgctcaataatggctgctggtcatttaaccaggcaatctgcatctggcaggcatcctgacaaggcaagtccgcgctgatgtggctcgttccaacggtacttgcatagaccagacgccagctcacacactcgtccagccttttggcgcttccagcacaacttccgttcccggcgtggagcgggaaacgctacgcaggctactggataaccagctaaacagttcacggaattgtaatccttgcagaggcaaaggctgacgaacgctaatttgtgccagcgtcttcatatccgccccctgaacaccgatggaaaagaaagcaaaccttttatcttcttccccccgaaacactttgttggctgcagcctgccactcatcggttggtgcaccatcggtaatcaggaaaatccacgggcgataatagctaataccatttgcacgatactcacgtttccgctcctctaccatatccagggctttggtaatggccgcacccattggtgtatcgccctgggcaaacaggatgggcggaaaaaaattagcggcgctggtaaagggttgttccacatgcaccgggccgaacgtcacaatgccgagttccactctttttaaagccagcggatcagcaagcagttcatcacgaaaggtaaccaatccggcgttaagttcattaataggtctaccgttcatagaaccagaaacatccagcagcaaaatgcaggggcaacgtggttccgggttactggcaaaatcgctggtggcaaacgtgatttgttcgctcataagaaatcctttcttagagaattatcgaggtccggtatcataccgactgcaataatgaaataagagcaaacgaagaaactttcagaattaggcccggcggcgcagaaaattttgctattcgcctcgcaagaacggagagccgtcgattgacactaagggcggagtgacataatttcaggagtgagggttagggagaggtttccccctccccctggtgttcttagtaagcctggaagctaatcactaagagtatcaccagtatgatgacgtgcttcatcataaccctttccttattaaaagccctcttctccgggagaggctttcccgtttcagcgtcccgctgaaatcatcggcttacctcctttcgccctgaatgcagtctatcgctaacgcgtgaataaaatagtttcctctgtgattattgcgtaacgactcgcaaagaatatttgctggcaggatcgcagactacaaagcctgcggattgacaatcttatcgtgaagacatactttcaggagtgagggtagagcggggtttcccccgccctggtagtcttagtaagcggggaagcttatgactaagagcaccacgatgatgagtagcttcatcatgaccctttccttatttatggccccttcctcgggaggggctttcccgtttcagcgtcccgctgaaatcgtcggcttacctcctttcgccatgcaagcagtctatcgctaacgcgtagataaaatagtttcctgtgttattactggatgcgtgctcgcaaatgtgcccgtcattcagacgattccagacagtgtttcataattcctccatttttctcccttattggctggctacactagtatcattccgcgaaacgtttcaggaagagaaactcttaacgatgaaaggtagttataaatcccgttgggtaatcgtaatcgtggtggttatcgccgccatcgccgcattctggttctggcaaggccgcaatgactcccggagtgcagccccaggggcgacgaaacaagcgcagcaaagcccagcgggtggtcgacgtggtatgcgttccggcccattagccccggttcaggcggcgaccgccgtagaacaggcagttccgcgttacctcaccgggcttggcaccattaccgccgctaataccgttacggtgcgcagccgcgtggacggccaactgatagcgttacatttccaggaaggccagcaggtcaaagcaggcgatttactggcagaaattgaccccagccagttcaaagttgcattagcacaagcccagggccaactggcaaaagataaagccacgcttgccaacgcccgccgtgacctggcgcgttatcaacaactggcaaaaaccaatctcgtttcccgccaggagctggatgcccaacaggcgctggtcagtgaaaccgaaggcaccattaaggctgatgaagcaagcgttgccagcgcgcagctgcaactcgactggagccggattaccgcaccagtcgatggtcgcgttggtctcaagcaggttgatgttggtaaccaaatctccagtggtgataccaccgggatcgtggtgatcacccagacgcatcctatcgatttagtctttaccctgccggaaagcgatatcgctaccgtagtgcaggcgcagaaagccggaaaaccgctggtggtagaagcctgggatcgcaccaacagcaagaaattaagtgaaggcacgctgttaagtctagataaccaaatcgatgccactaccggtacgattaaagtgaaagcacgctttaataatcaggatgatgcgctgtttcccaatcagtttgttaacgcgcgcatgttagtcgacaccgaacaaaacgccgtagtgatcccaacagccgccctgcaaatgggcaatgaaggccattttgtctgggtgctgaatagcgaaaacaaggtcagcaaacatctggtgacgccgggcattcaggacagtcagaaagtggtgatccgtgcaggtatttctgcgggcgatcgcgtggtgacagacggcattgatcgcctgaccgaaggggcgaaagtggaagtggtggaagcccagagcgccactactccggaagagaaagccaccagccgcgaatacgcgaaaaaaggagcacgctcctgatgcaggtgttacccccgagcagcacaggcggcccgagccgcctgtttattatgcgtcctgtggccaccacgctgctgatggtggcgatcttactcgccgggattatcggttatcgcgccctgcccgttagcgcgctgccggaagtggactatccgaccattcaggtggtcacgctctacccaggtgccagcccggatgtcatgacctctgccgttaccgcgccgctagaacgccagttcgggcagatgtctggcctgaaacagatgagcagccaaagttccggcggtgcgagtgttatcactttgcagttccagctaacattaccgctcgatgtcgccgagcaggaagtgcaggccgcgattaacgctgcgaccaacttgttgccgagcgatctgcctaacccgccggtttacagcaaagtgaacccggcagatccgccgatcatgacgctcgccgtcaccagtaccgccatgccgatgacgcaagtggaagatatggtggaaacccgcgtcgcgcagaaaatcagccagatttccggcgtcggcctggtgacgctttccggcggtcagcgtccggctgttcgcgtcaaacttaacgctcaggcgattgccgccctcggcctgaccagcgaaaccgtgcgcaccgccattaccggcgctaacgttaacagcgcaaaaggtagcctcgacggcccttcccgtgcggtcacgctttccgcgaacgaccagatgcaatccgccgaagagtatcgccagctaatcatcgcctaccagaacggcgcgccaattcgtctgggcgatgtcgcaactgtagagcaaggtgcagaaaacagctggctcggcgcgtgggcgaacaaagaacaggccattgtgatgaatgttcagcgccagcccggtgctaacattatctccaccgccgacagcattcggcagatgctgccacagctcactgagagtctgccgaaaagcgtgaaggtgacagtgctttccgatcgcaccaccaatatccgcgcatccgtcgatgatactcagtttgaattgatgatggctatcgcgctggtagtcatgattatctacctgtttttgcgcaatattccggcgaccatcattcccggtgttgctgtaccgctgagcttaatcggcactttcgcggttatggtgtttctcgattttagtatcaataacctgacactgatggcgttaactatcgccaccggattcgtggtcgatgacgccatcgtggtgatcgaaaacatttcccgctatatcgaaaaaggcgaaaaaccgttggcggcggcgctcaagggcgcaggtgaaatcggctttaccattatcagcctgaccttcagtctgattgcggtgttgatcccactgctgtttatgggcgatatcgtcgggcgactgttccgcgaatttgctattaccctggcggtagcgattttgatcagtgcggtggtgagcctgaccctgacaccgatgatgtgcgcgcggatgctcagccaggagagcttgcgtaaacagaaccgcttctcccgtgccagcgaaaaaatgttcgacaggataatcgccgcctatggtcgtggactggcgaaagtgctgaatcatccgtggctgaccttaagcgtggcactcagcacgctgctgcttagcgtgctgctgtgggtgttcattccgaaaggtttcttcccggtacaggacaatggcattattcagggcactttgcaggcaccgcaatccagctcctttgccaatatggcccagcgacaacgccaggtcgcggacgtgattttgcaggatccggcagtgcaaagcctgaccagttttgttggcgttgatggcactaacccgagcctgaacagtgcacgtttacaaatcaacctcaaaccgttggatgaacgtgatgatcgggtgcaaaaagtcatcgcccgtctgcaaacggcggtagataaagtgccgggcgtcgatctcttcctgcaaccaacgcaggatctgactattgatactcaggtcagccgcacccagtaccagtttaccttgcaggccacgagtctggatgcgctcagtacctgggtgccacagttgatggaaaaactccagcaactgccacagctttctgatgtctccagcgactggcaggacaaagggctggtggcgtatgtcaatgttgatcgcgacagcgccagccgtctggggatcagcatggcggatgtcgataacgccctgtacaacgcgtttggtcagcggctgatttccactatttatactcaggccaaccagtatcgcgtggtgctggagcacaacaccgaaaataccccaggcctcgcggcgctggataccattcgcctgaccagcagcgacggcggcgtggtgccgctaagcagtattgccaaaattgagcagcgttttgcgccgctctccatcaaccatctggatcagttcccggtaacgaccatctcctttaacgtgccggataactatagcctgggcgatgcggtgcaggcgattatggacaccgaaaagacgctgaatctgccggtggatatcaccacgcagttccagggcagcaccctcgccttccagagcgcgctgggcagcactgtctggctgattgtcgcggcggtggtggcgatgtatatcgtgctcggcattctgtacgagagctttattcacccgatcaccattctcagcacgctacccaccgcaggggttggcgcactgctggcgttgctgattgctggtagcgaactggatgtgattgcgattatcggcattattttgctgatcggtatcgtgaagaagaacgccatcatgatgatcgacttcgcgctggctgctgagcgcgagcaaggcatgagcccgcgcgaggcaatctaccaggcttgtctgttgcgttttcgtccgatcctgatgaccactctggcggctctgcttggcgcgctgccgctgatgttgagtaccggggtcggcgcggaactgcgtcgtccgttaggtatcggcatggtcggcggtctgattgtcagccaggtgctgacgctgtttaccacgccggtgatttatttgctgttcgaccgcctggcattgtggaccaaaagccgctttgcccgtcatgaagaggaggcgtaagtgaagttttttgccctcttcatttaccgcccggtggcgacgattttactgagcgttgccattaccctgtgcggcatactgggcttccgtatgctgccggtcgccccgctgccgcaggtcgattttccggtgattatcgtcagcgccagcctgcccggtgcgagtccagaaacaatggcgtcttccgttgccacgccgctggagcgcagtcttgggcgcattgccggagtcagtgaaatgacctccagcagtagcctcggcagcacgcgtattattttgcagtttgattttgaccgggatatcaacggcgcagcgcgtgatgtgcaggcggcgatcaacgctgcacaaagtttgctgcccagtgggatgcccagccgcccgacctatcgcaaagcgaacccgagcgatgcgccaattatgatcctcacgctgacgtccgatacttatagccagggtgaactgtacgatttcgccagcacgcagctggctccgacgattagccaaatcgacggtgttggtgatgtcgatgtcggaggcagcagtctgcccgccgtacgcgtcgggctgaatccgcaggcgctgtttaatcagggcgtgagcctggacgacgtacgcaccgccgtcagcaatgccaacgtgcgtaaaccgcagggcgcgctggaagatggcactcaccgctggcagatccagaccaatgatgagctaaaaaccgccgctgaatatcagccgttgattattcactacaacaacggcggcgcggttcgtctgggcgatgtggcgacggtgaccgacagtgtgcaggatgtgcgcaacgccgggatgaccaacgccaaaccggctattttactgatgatccgcaaactgccggaagccaatattatccagacggttgacagcatccgggcaaaattaccggagttgcaggaaaccattccggcggcgattgatctgcaaattgcccaggatcgctcccccaccattcgcgccagcctggaagaagtcgagcaaacgctgattatcagcgtggcgctggtgattctggtggtgtttttattcctgcgcagcggtcgcgccactattattcccgccgttagcgtgccggttagcctgattggtacgtttgcggcgatgtacctgtgcggattcagtctcaataaccttagcttaatggcgctcaccatcgctactggtttcgtggtggatgacgccatcgtggtgctggaaaacattgcacgtcatctggaagcgggaatgaaaccgttgcaagccgcactgcaaggtactcgcgaagtcggttttacggtgctgagcatgagtctgagtctggtggcggtgttcctgccgctgctgttgatgggcggattgccgggccgactgttacgcgaatttgccgtgacgctttctgtcgccattggtataagcttgctggtttctctgacattaacgccaatgatgtgtggctggatgctgaaagccagcaagccgcgcgagcaaaagcgactgcgtggttttggtcgcatgttggtagccctgcaacaaggctacggcaagagtctaaaatgggtgctcaatcatacccgtctggtgggcgtggtgctgcttggcaccattgcgctgaatatctggctgtatatcagcatcccgaaaaccttcttcccggagcaggacactggcgtgttgatgggcgggattcaggcggatcagagtattagctttcaggcgatgcgcggtaagttgcaggatttcatgaaaattatccgtgacgatccggcagtggataatgtcaccggctttacaggcggtagccgagtgaacagcgggatgatgtttatcaccctcaagccacgcgacgaacgcagcgaaacggcgcagcaaattatcgaccgtctgcgcgtaaaactggcgaaagaaccgggggcgaatctgttcctgatggcggtacaggatattcgcgttggtgggcgtcagagcaacgccagctaccagtacacgttgttatccgacgacctggcggcactgcgagaatgggagccgaaaatccgcaaaaaactggcgacgttgccggaactggcggacgtgaactccgatcagcaggataacggcgcggagatgaatctggtttacgaccgcgacaccatggcacggctgggaatcgacgtacaagccgccaacagtctgttaaataacgccttcggtcagcggcaaatcagcaccatttaccagccgatgaaccagtataaagtggtgatggaagtggatccgcgctatacccaggacatcagtgcgctggaaaaaatgttcgttatcaataacgaaggcaaagcgatcccgctgagctatttcgctaaatggcaaccggcgaatgccccactaagcgtgaatcatcagggattaagcgcggccagcaccattagctttaacctgccgaccggaaaaagcctcagcgacgccagtgcggcgatcgatcgcgcaatgacccagcttggtgtgcctagcacggtgcgcggcagttttgccggcacggcgcaggtgttccaggagacgatgaacagccaggtgatcctgattatcgccgccatcgccacggtgtatatcgtgctgggtatcctttacgagagttacgtacatccgctgacgattctctccaccctgcccagcgcgggcgttggagcgctgttggcgctggagctgttcaatgccccgttcagcctaatcgccctgatagggatcatgctattaatcggcatcgtgaagaaaaacgccattatgatggtcgattttgcgcttgaagcccaacggcacggtaacctgacgccgcaggaagctattttccaggcctgtctgctgcgttttcgcccgattatgatgactaccctggcggcgctgtttggtgcgctgccgctggtattgagcggcggcgacggcagcgagctgcggcaacccctggggatcaccattgtcggcggactggtaatgagccagctccttacgctgtataccacgccggtggtgtatctctttttcgaccgtctgcggctgcgttttagccgtaaacctaaacaaacggtaaccgagtaaatgacagatcttcccgacagcacccgttggcaattgtggattgtggctttcggcttctttatgcagagcctggacaccaccatcgtaaacaccgcccttcccagtatggcgcaaagcctcggggaaagtccgttgcatatgcacatggtcattgtctcttatgtgctgaccgtggcggtgatgctgcccgccagcggctggctggcggacaaagtcggcgtgcgcaatattttctttaccgccatcgtgctgtttactctcggtagtctgttttgcgcgctttccggcacgctgaacgaactgttgctggcacgcgcgttacagggcgttggcggcgcgatgatggtgccggtcggcagattgacggtgatgaaaatcgtaccgcgcgagcaatatatggcggcgatgacctttgtcacgttacccggtcaggtcggtccgctgctcggtccggcgctcggcggtctgctggtggagtacgcaagctggcactggatctttttgatcaacattccggtggggattatcggtgcgatcgccacattgctgttaatgccgaactacaccatgcagacgcggcgctttgatctctccggatttttattgctggcggttggcatggcggtattaaccctggcgctggacggcagtaaaggtacaggtttaagcccgctgacgattgcaggcctggtcgcagttggcgtggtggcactggtgctttatctgctgcacgccagaaataacaaccgtgccctgttcagtctgaaactgttccgtactcgtacctttagcctgggcctggcggggagctttgccggacgtattggcagtggcatgttgccctttatgacaccggttttcctgcaaattggcctcggtttcagcccgtttcatgccggactgatgatgatcccgatggtgcttggcagcatgggaatgaagcgaattgtggtacaggtggtgaatcgctttggttatcgtcgggtactggtagcgaccacgctgggtctgagcctggtcaccctgttgtttatgactaccgccctgctgggctggtactacgttttgccgttcgtcctgtttttacaagggatggtcaacagcacgcgtttctcctccatgaacaccctgacgctgaaagatctcccggacaatctggcgagcagcggcaacagcctgctgagcatgattatgcaattgagcatgagtatcggcgtcactatcgccgggctgttgctgggactttttggtagtcagcatgtcagcgtcgacagcggcaccacacaaaccgtctttatgtacacctggcttagcatggcgttgatcatcgcccttccggcgttcatctttgccagagtgccgaacgatacgcatcaaaatgtagctattagccggcgaaaaaggagcgcgcaatgaagttctggcgacccggtattaccggcaaactgtttctggcgattttcgccacctgcattgtcttgctgatcagtatgcactgggcggtgcgtatcagttttgagcgtggctttattgattacatcaagcatggtaatgaacagcgattacaactgttaagtgatgcgcttggcgagcagtatgcgcagcatggcaactggcgcttcctgcgcaacaatgatcgctttgtctttcagatcctgcgtagttttgaacacgataatagcgaagataaacccggcccgggtatgccaccgcacggctggcgtacccagttctgggtggttgatcaaaacaacaaagtgctggttggtccgcgagcgccgattccacctgacggtacacggcgacccattctggtcaacggtgcggaagttggcgcggtgatcgcctcccccgttgagcggttaacgcgcaatactgatatcaatttcgataaacaacagcggcaaaccagctggttgattgtcgccctggcaacgttactcgcggcacttgccacttttctgctggcgcgcggtttactggcaccggtaaaacgacttgtcgatggcacgcacaaactggcggcgggcgatttcactacccgcgtaacgcccaccagtgaagatgaactgggcaaactggcgcaagacttcaaccagcttgccagcacactggagaaaaaccagcaaatgcggcgcgattttatggccgatatttctcacgaactgcgtacgccattagcggtgctgcgcggtgaactggaagccattcaggatggcgtgcgtaaattcacgccggagacggtggcgtctttacaggcggaggtcggtacactgaccaaactggttgacgatctccatcagttgagcatgtctgatgaaggcgctctcgcctatcaaaaagcaccggtagatttgatcccactgctggaagtggcgggcggcgcatttcgcgaacgattcgccagtcgtggcctgaaactgcaattttccctgccagacagtattaccgtatttggcgatcgcgaccgtttaatgcagttattcaataacttactggaaaacagcctgcgctacactgacagcggcggcagcctgcaaatctctgccgggcagcgcgacaaaacggtgcgcctgacctttgccgacagtgcgccaggtgtcagtgacgatcagctacaaaaattgtttgaacgtttttatcgcaccgaaggttcccgcaaccgtgccagcggcggttccgggctggggctggcgatttgcctgaacattgttgaagcacataatggtcgcattattgctgcccatagcccttttggcggggtaagcattacagtagagttaccgctggaacgggatttacagagagaagtatgaccgagttaccaatcgacgaaaacacaccgcgtattttgatcgtggaagatgaaccgaagctggggcagttgctcattgattatctgcgtgctgcgagctatgcgccgacgcttatcagccacggcgatcaggtactgccgtatgtgcgccagacaccaccggatctgatcctgttagatctgatgctccctggcaccgatggcctgacgctgtgccgggaaattcgtcgtttttctgacattccgatcgtgatggtgacggcaaaaatcgaagagatcgatcgcctgctggggctggagattggcgcagatgattatatctgtaagccgtacagcccacgggaagtggtagcgcgcgtcaaaaccattttgcgccgttgcaaaccgcagcgcgagttgcagcaacaggatgctgaaagcccgttgattatcgacgaaggtcgttttcaggctagttggcgcggtaaaatgcttgacctgacgcctgcggaatttcgtctgctgaaaacgctctctcacgaaccaggaaaagtgttctcccgcgagcaattgctcaatcatctttatgacgactaccgcgtagtaaccgaccgcaccatcgacagccacattaaaaacctgcgccgcaagctggaatctctcgacgccgaacagagttttatccgcgccgtttatggcgtcggttaccgctgggaagccgacgcctgccgcatcgtttaattttagcgacattattttgttagccggagatggcgttcagaccagatccggcaacattatcccacgcatggtcagcaaactgacattatctctccgccctggcaggcatcagaaaatcgctcatactttaatcggtaaacagcacctttagaatcctgtcgtttgttttcgatttcaaaatataatgaaattatttgtttttaaatatcgagataacgatcacaaaaacgacaatatgaaaattattcgaggagtgaaaggcaaaaaaacggcctcccgatagggaagccgtagcaaagtgcgcgtgtttttatgccggatgcggtgtaaacatacgtggcagtgctatgtaggcatgataagacgcttcagcgtcgcatcaggcataggttgccggatgcagcgtaaacgccttatccgtcctacggggtggtgttgttcgtataaggcgtatcaggcgatagtaattttgctatcgagataaacgtcctgcacggcgttaatcagtttcacgccgtcagccatgcttttcttgaacgctttacgtccaagaatcagccccattccgcctgcgcgtttgttgataaccgcagtacgcactgcatcgctgaggtcagtttcaccgcccgcagcaccgccggagtttatcaacccagcccgacccatatagcagttagctaactgataacgcaccagatcaatcgggttttcgctggtcaatttgctgtaaacacgatcgtcggtgtaaccgtaattaattgctttatagccgccgttattttccgccattttttgtttgacgatatctgcaccgatggttgccgccagatggtttgcctgaccggtcaggtcggcggaaacatggtaatcaacgccatctttcttaaaggcggagttacgcaaataggcccacagcactgtcaccatacccagctcgtgcgcacgttcaaaagccgcagaaatttcttcaatctggcgacgactctcttcgctgccaaaatagatagtcgcaccaaccgcaaccgcgcccatgttgaacgcctgctccacgctggcatacagcgtttgatcgtaggtattcgggtaacttagcgtctcgttgtgattaagtttgacgaggaatggaatgcgatgcgcataacgccggcttacgctcgccagcacgccgtaagtactcgccacacagttacagcccgcttcgatcgccagttcaacaatgtttttcgggtcaaagtagagcgggttagcagcaaaactagctccggcagagtgctcaacgccctggtcaaccggcagaatagaaagatatcctgtgccagccagacgcccggtgttgtacaacgtctgcatattacgtaacaccgctggcgggcgattattgtcaatcattacgcggtctacgtagtcatgtccggggagataaagctggtcagaaggaattgtcatacaacggtgctgtaaaaggttgtcggcgtctttgccaagcaactgcgcaatatctgtcattactatgctcccgtaaattccgattggatatcggctatggattgtcctggcccgccttttgcgggcaatcataatcctggtcgttacgggcgagtttttccatcttttggatgttttttcagcgttttctgttggctcgattcatcagaaaaaatgttagcgcggtcaagttttcaccgcaaaggtatttaaaaggtattattaagtggtattgtcatcgcgtaccttacattacctgtcatgaaggaattaaaagatgaaaacaacagcaaagctgagcttcatgatgtttgttgaatggtttatctggggcgcgtggtttgtgccattgtggttgtggttaagtaaaagcggttttagtgccggagaaattggctggagctatgcctgtaccgccattgcggcgatcctgagcccaattctggttggctccatcactgaccgctttttcagcgcgcaaaaagtgctggcggtattgatgttcgcaggcgcgctgctgatgtatttcgctgcgcaacagaccacttttgccgggttcttcccgttactgctggcctacagcctaacctatatgccgaccattgcgctgactaacagcatcgcttttgccaacgtgccggatgttgagcgtgatttcccgcgcattcgtgtgatgggcactatcggctggattgcctccggtctggcatgtggtttcttgccgcaaatactggggtatgccgatatcagtccgactaacatcccgctgctgattaccgccggaagttctgctctgctcggtgtgtttgcgtttttcctgcccgacacgccaccaaaaagcaccggcaaaatggatattaaagtcatgctcggcctggatgcgctgatcctgctgcgcgataaaaacttcctcgtctttttcttctgtagtttcctgtttgcgatgccactagcgttctattacatctttgccaacggttatctgaccgaagttggcatgaaaaacgccaccggctggatgacgctcggccagttctctgaaatcttctttatgctggcattgccgtttttcactaaacgctttggtatcaaaaaggtattattgcttggtctggtcaccgctgcgatccgctatggcttctttatttacggtagtgcggatgaatatttcacctacgcgttactgttcctcggtattttgcttcacggcgtaagttacgatttttactacgttaccgcttacatctatgtcgataaaaaagcccccgtgcatatgcgtaccgctgcgcaggggctgatcacgctctgctgccagggcttcggcagtttgctcggctatcgtcttggcggtgtgatgatggaaaagatgttcgcttatcaggaaccggtaaacggactgactttcaactggtccgggatgtggactttcggcgcggtgatgattgccattatcgccgtgctgttcatgatttttttccgcgaatccgacaacgaaattacggctatcaaggtcgatgatcgcgatattgcgttgacacaaggggaagttaaatgaaaacagaacgtattctcggtgctctttatgggcaggcgttaggggatgcgatggggatgccctccgagctttggccacgcagccgcgttaaagcacactttggctggattgaccgttttcttcctggaccaaaggagaataacgcggcctgttattttaaccgcgccgaattcaccgacgataccagcatggcgctgtgtctggcggatgcgttactggaacgtgaaggcaagatcgatccggatctgattgggcgtaatattctcgactgggcgctgcgtttcgacgcctttaacaaaaacgtactaggtccgaccagcaagattgcgcttaacgccattcgcgacggtaaacccgttgctgaactggaaaacaacggcgtgaccaacggcgcagcgatgcgcgtcagcccattaggttgtttgcttccggcgcgtgatgttgattcctttattgatgatgtagcgctggcgtccagcccgacccataaatccgatctggcggttgcaggcgcggtagtcatcgcatgggcgatttctcgtgccattgacggagaaagctggagtgcgattgttgattccctgcctagtattgcgcgacatgcacagcaaaaacgcatcactacgttcagcgccagtctggcggcgcggctggagattgcgctgaaaattgtgcgcaatgccgacggcaccgaatccgccagcgaacagctttaccaggtcgttggcgcaggtaccagcactattgagtccgttccgtgcgccattgcgctggttgaactggcacaaaccgacccgaatcgctgcgccgtcctgtgcgctaaccttggcggcgacacagacaccatcggtgctatggcgacggcaatttgcggcgcgttgcatggcgttaacgctatcgatcctgcgttaaaggcggaactggatgcggtaaatcagcttgatttcaaccgctatgccacagcgctggcgaaatatcgtcaacaacgggaggcggtatgagcggcgctcgattacacacgctgctgcctgaattaaccacgcgtcagagcgtgatggtcgtcggcgcggcggtcattgacgtgatcgccgacgcttatgccctcccctggcgtgggtgcgatatcgaactgaaacagcagagcgttaacgttggcggctgcgcactgaatattgccgtggcgttaaagcgcctcggcatcgaagcgggtaatgccttgccgctcggtcagggcgtgtgggcggagatgattcgcaaccggatggcaaaagagggcttaatcagcctgatcgataacgccgaaggtgataacggctggtgtctggcgctggttgagccggatggcgaacgcacttttatgagtttcagcggtgttgaaaatcagtggaatcgccagtggctggcgcgattaaccgttgcgcctggcagcctgctctatttttccggttatcaactggccagcccctgcggcgaattgttagtggaatggctggaagagctgcaagacgtgacgccgtttatcgattttggcccacgtattggcgatatcccggatgcattactggcgcggatcatggcctgtcgacctttagtgagcctcaatcgtcaagaggctgagattgccgccgaacgttttgctttatccgcagagataacaacacttggcaagcaatggcaggagaaatttgccgcgccgttgatcgttcgtctcgataaagaaggcgcatggtatttcagcaacgacgcttctggctgcattccggcatttccaacgcaagttgtcgacaccattggggcgggcgacagtcatgccggtggcgtacttgccgggctggcctctggtctgccactggcggatgccgtattactgggcaatgcagtggcgagctgggttgtcgggcatcggggcggtgattgtgcgccaacgcgcgaggaactactcctcgcacacaaaaacgtataattactcctcgcacacaaaaacgtatagatcgctgcgacagtggctaatgctgtactcaataggccgttgctgttggtcaagcgccacttgcttgatcaccagcaccggtattttgctatctaactgaatatgactctgaaactcggcatccggcatccgggcgctaacgcgggaacgcgtacgttgtgggtaaatgtgctggctgcggaaatagtcataaagactaatcccgatggcatcaacatcatgaattaaatgcgccggaacccagctttcctcaatgcttaccgcttcttcatcgacatagcgaatacgcttaagcaaaaagacatcacttcctgcttcgaccgccagctgctgcgcgacttcttcgggacatttcacgacacgcttgttaacccatagcgtatcgggctttttcccgcgcaataccacctgctgagaaaaacctcgcgcttctttcaagctgtattcgaagatgttgttgatctgcgtgccgtaaccgcggctacgcgtcaccacaccctcttcttccagcgcctgcatcgccttgcgcaccgtaatgcggctaacgccggttaactgacttaaatcacgttcaccgggcaaaatattgccatgctccagcaccccgctgcgcacggcattttttaccgtttcggcaaacttaatataaagcggcgtgttatccgccgctaaaatacgctcgttcagttgggcaatcagctgggtatgcgcttgttccatttgtctttttcctgccggggagtctggtgggagtatatcactgcttcttatttaaggcgtttctttaatcccatcaacgaatgcctgcaactcctccaccgtgccattaaatacattaaaatccaccggaccattgatgccatctacctgtccacggtcggaatgctgccagaagcgccaggccattccgtcattgtccggacgacgttgatagtagtgagccacccaccacggatattcattgaaatagcccgccagattggtgtgataaaaaacggctccactgtaaataatcggctttttccccgtacttttttcgaccatttttagccactgacttacccgcttgcgtaattcttttgcgcttaattttccccgttcttctacgtccagcacggcagggaaatcgccttgactgaaatccaccgtttgcagaaataatctcgcctgaacactagcggatacgctcggggagaaataatgatacgccccacgcagcaggccattttcgcggcttagttgccagttacggctaaaataggggtccaccagcttttcgccttccgtcgccttaataaaagcaaactgtaagcggataccattgtcgcgcatttttgccacccgctgccagtcgatccgctcctgccagcggctaacatctattccgtgaatggtgtaactggcaggaatgcgaatagcgaaagatttaaccgggcgataaccgtagaagtggatgtagtctgtaatctgaactgctgtgctatagaaaaaattcaccgtctgacgcggataaattgcaacgatggaaattagcccaagagcgcataatagagaggtgagtttttttcgactggtaattcttagctgcattggtttcatccctgaatgtcagtgccaaaggctgacaataaccaaagcagctatagtacggcgctcaccaccaggcgtggaagtggtgaaccggaccaataccgtgaccaacttccagcgtgtcggcctgggctaacgcgctactaagccagctttttgcctcctgtacggtgtcagcccagtttgtatggcgcgggcgtagtgcagccaacgccgcagagagtgtacaaccagtgccgtgggtgtttttggtcataatgcgcggtgcggtaaaccgttgttcaccctcgcgggtaaacagccagtccgggctttgctcatcatccagatgaccacctttcattagcactgcgccacagcccatcgccaacaggcttcgcccttgttccagcatttcctgttcggtgcgcgcgtgtggcgcgtcgagcaaggcggcagcttcgggcaagtttggcgttattaaactaacctgtggcaataatcgactgcgcagcgtagcaaccgcgctaggactaagcagcgggtcgccgctttttgccagcataacggtgtcgagtaccacgttttggatctgataacgttgcaaccgttctgccaccgcttcaacaatatcggtttccgccagcataccgattttagtggtatcgattcgcacatcgctgaacacgctatcgagctgggcggcgacaaaatcaggctcaatgcgatacacgctctgtacgccacgggtattttgcgccaccagtgcagtaataacactgcaaccataagcgccaagtgcgctgaaggttttaagatcggcctgaatccccgcaccaccactcggatcagtaccggcaatcgtcagagcgttaattcgtttcatgcctgcacctcctgcgtcaattgccagagcgcatcaaggaaatgtggaacaaaactgcctggcccctcgcttctggcgactgcgcgttctccggcttgtttcatccagtgacaggcagatgcgacattttccagcgtatcgcctggtaacgcacagcaggcagcgacaaccgcgcttaatgcacagccagttcctaccactttggtcattaacggatcaccaccgtgaataccaatgatacgatgtccatcggtaacataatccatctcgccagtgaccacgacgattgcgccagtttcccgtgccagtgtttgtgcagcgggtatcgcgttagctgcggcgtcagtggtatccactccccgtccgccattagcaatgccagctaatgccatgatttcgctagcattaccacgtatcgctgccggtttaaaagataaaagttcatgacaaaaatggcggcgataatcgagcgcacccaccgctactggatcaagcgtccagggtgtttgagagctttttgcttgctcaacggcagcacgcatcgcctgagcgcgtggctgcgtcagtgtgccaacgttaatcaacaaggcactggcgatagccgcaaactgactggcctcttcggtttcgataaccatcgctgggcttgcaccgagcgccagcaaggtattggcggtaaaggtttgcaccacatcattggtcatgcagtgcacaagaggggaatgttggtgaaaaaggtgtaacgcgtgcgcagattgcgcactacccagcaggtcgacttgcatagtttgctcctgccataacgtgaagaagcaatgacctggtggtccgtgacttccctacgctggcattatccagatcaggtgatacgggtatttctcagccttcacgcagaagggcaccccgagtcgtttggttgcgatgataaatcgcagaggaggatggtaatgtccagcgcacgcgttgtaaacgaggaaaaacggcagttttacaatcgcgttaataaattatttgatataactatccagcaccttcagaacgacatccagatcttcttcacgttttagctcatccccctggtgaacgatgtgttccgtcagatgacctttaatcacttcccgcatcagaccgtttaccgcgccacggatagcagcaatctgttgtaaaactgcagcgcattcgtgcggctcgtcgagcattttcttgagcgccacgacctggccctgaatcttactggcacgcgctttcagtttctgtttatcacggattgtatgagacatggcaacacctggttaacaagaatatgaaaaatcatagcactattaatctactggggggtagtatcaggtactgggggggagtagaatcagattgccgaattaatactaagaattattatcatgaccgaatttacaactcttcttcagcaaggaaacgcctggttcttcatccccagcgccatcttacttggtgcgcttcatggcctggaaccagggcacagtaaaacgatgatggcggcgtttatcatcgccatcaaaggcaccattaaacaagcggtgatgctcggactggcagcaactattagccataccgcagtggtctggttaattgcctttggcgggatggtgatcagcaagcgctttactgctcaaagtgcagaaccgtggctccagctgatttccgcagtgatcattattagcaccgcgttctggatgttctggcgtacctggcgcggcgaacgcaactggctggagaatatgcacgggcatgattatgagcatcatcatcacgatcacgaacatcaccacgaccatggacatcatcaccatcacgaacatggcgagtatcaggatgcccatgcacgagcccatgccaatgacattaaacgacgctttgatggtagagaggtcaccaactggcaaattttgttatttggcttaaccggtggccttatcccctgcccggcagcaattaccgtgctgttgatatgcattcagttgaaagccctgacactgggcgcaacactggtcgtcagtttcagcattggcctggcgttaacgcttgtcaccgtaggcgttggcgcagcaatcagcgttcagcaggtcgcaaaacgctggagcggatttaacactctcgctaaacgcgccccctatttttccagtctgttgattggcttagtcggtgtgtatatgggcgtacatggcttcatgggcataatgcgataactcaatcctttaggcttgcatgttatcttcagcccaggatgattcttaaatcagctatttccgctgactctctgctcgctaaggatgcttttagggcatcctttcatttacactttttacgaaatcatgggatcactaacaaaatatcgcttgtcagttatattgtatggcaggaaagatatgcgactgatattacagatccccaaagtggagagtttatgaccattaaaaataagatgttgctgggtgcgcttttgctggttaccagtgccgcctgggccgcaccagccaccgcgggtagcaccaataccagcggaatttctaagtatgagttaagtagtttcattgctgactttaagcatttcaaaccaggggacaccgtaccagaaatgtaccgtaccgatgagtacaacattaagcagtggcagttgcgtaacctgcccgcgcctgatgccgggacgcactggacctatatgggtggcgcgtacgtgttgatcagcgacaccgacggtaaaatcattaaagcctacgacggtgagattttttatcatcgctaaaaaaagccccctcatcatgagggggaaatgcagacaccttgttattttttattattagccacttgctcgtcttgcttgttattagtcgtatttcacgttgattaatgcggttgcctccagtgcgccagatttaactttgtttgtatcgtagacgtagtaactggctgttatcggaatactaaccgttgtatctgtaagtttactcttcgccgcaacttcctttaaatttgtatatcctttactgctgttagtgatatttaaaagtgtgactgggctaccattactttcaagaataaatcctacgccattatcttccgcacctttcagtattgtgttgctgttggttaacaagtcagaactacttaaatacacctgcattttccgacttgtttgattttgttgacctaataaatttttacaacgcagaataatatccccttgtttactatttattgttgctttgttacctgtggctggtaattgactaacgggaatactgtctaaagtaattaataaatcgtccggtttgcaggttgtggttatcgggttgtaactcaatgtcagattaaaggaatagacacctgcattttgtgccaatgcatttctgtagctatttacacatgcatcccaactcttgccacctaataaacacagtagaaattgtactgcggcactcccgcgtgtgctactactagcactggataatgtcgcaacaccattaatcatcacactaccgccgccccccgcagaaacattcacttttgcattactggccgcaggtgtcaccgtaacactataaccactggtgaaactggtctgattattactcaacgtgatgttgtttttattggtccattcaaaatgtaaatttaattttatggtatcgttataaagtccaacaataatatcgctcgggctcataggggtgatagtatttgtacttacgcaactgctatcattaaaattatgctcatatgtcgccatttgtgtttgagtaagtgcaaaatccccctgaacaaccaagttgtgctgaacagataactcactataacatgccgcatagctcacaggcataaccatcatcattaatataaatagcattatgcgaatttccatagaaccacctgactattactggcaaatataatttctactttcatcaatctctttaccgaaggtgattgtgcaactaagtccttgttgcttatcaattgccacattaacgcttggcggtacttcattggtgcgaataaataactgacttccctggccgacaacgccaatattatgaccatggatatcattgacttcataaccaaacgttaaactttgcccatctgctcttaacgcttttataaaccatggcttgcgctgatcggtatcaaaattaaccagtacaaccgcgccgcgataaggggcggcaattttccggttgccacgtaattctgcttcgctatcgctttggctcacatccagcatcaggtgattttcccgataaggtgtcattccgtcgtatatcaccactccattacggtttgttgtgcgatatttttgcccattgacataagcatctttaattcctggcgcattcatcacagcaaacgtttcggaaagacggttcgccagattaacgccaccgctccaggcgacaatgcccccactaacactggctccagcctgtcgataagtactgctctgactataactgccattcactgtcgcaaccggcgcgttccaggtcaaattcgccccagctgtcgtttcatttccctgatgttgatgactcaggttgacaccataattgaactgatcccgactccctactgttccacttaatcccgtattattactggcaaacccctgatcatcaaacgtcgtactgttagacatatatatttgccgacgaggcgtgctaacgtcatcaccccaatcaaagggaatgcttataaaaatattaaaacgtttctcttcatgatgattctcgtcataagcctggcttgccgcgagggtatagcttatccgtcgcaggttgttggaataactcaactgataatccttactactgccgctacgcccccagtaatctcgccataacgtacttaaactcacagacccccaaccttctggcaaactctggctcatattggcggaaaagctatttttgcggccaaaatcgttctggtaataatcggcaatgtcatagacatcgttttcatcacggcgataattatctttattgtttgcccaaacgtgatcgttaaatgtccggtaatcacggctgctataacgccaggccgccagaccaaaacgcgtgctcgtttggctcacaaacttgttgtaggcaatttgataactttgcccgtcaaacacatcgccgttgtcttgtttactatggctcttagtggcatcgacggaaatggcaccaatgcgtgtattccagccagcccccaaagtaaacgcgtaataattattcgcgaccatgctgccaccatacagcgtcaataaattattaaaaccatactgataacccgcctggacaaaatcactttgtttgctcgccccttcaatatggctacgacccgccgctaaatcatatttgctcacgccgggttgcagcatatttggcaccgctgcataaggcaccagataggtggttacgctgccgtccgcctctttcacgctgacatcaagatctgctccaccaccggccaactgcaaatctgtaatcgcgaacgggccaggaggaacctctttctgataaaccacaaaaccattctgttcaatagttaccagcgcgttactctgagcaatcccctgcacccgtggcgtaaaattttgtttgctgttaggcaacatctgcatatcacgaaacaaccgcacacctctgaagcgaacagaatcaaaaatatcgctacttgtgtacatatcacccacgcgaagcgtgccgagaagttgggcaaatccacgttccagatacagggtattgcttttccacacccctggattgttatttgttttactgaaactggcatcagaatgcagttgccaccccagtaaatttaacccgctgttaaaacgtacatatgtactcttgttattaccgctcgctttatagtcgctgtaatactgactcagataataagaggtataaaacgcattaataccccgctcccagttttccggtggaacatagccactttccagttcttccacccaggcctgcgggacactgaaatcgagacgaaaaaccccgatatcccaggtatagctcccaccctgaacaagttgctcaaatgttaaacattgcttaccgctggcgaagttatcgctattaatgcctaaccgcttgataacttctctacttaaacatgtttcttgcgggttgtctttaacaataatctcatatttcccgcgccattgcttattgacataaatatcgatgtcatactgccccggtaagggttgattatcatcaagacgaatatttgcaacctgctggtctttcattccacctatcataaaatgggtatcaaaggtttcttcagctgcataagcttcaatgccgagcaataacgctacgattgcacttgcaagtggggtcattctcaacataggcagctcctgcaattaaattttgtcactaatatagttgccatggtcatcgataatggtcagatgccagttatttgcattattacttttgacattaacactctgactttctaagggggcaatcataatagtttcataattgactttgacattattagctttgacatcgctaatcgtcacccaattagcactgtcattttttatcaccaaaccattgccactgcgatttaccagcaattttttaaatgtcgctttatttaccggagcaatacccgctggccggtaaaacaacttaattctgttttgcatcgcaaacttcagtgcattcttaccttcttgctctggactatttggtggaatatccagaacattcagataaaaaatgctttctttattagtgggcagtttattcggcataattttgatttttacttgctgcccggaatttgcccctatttttgccactggtggcgttaacatgaaaggaacctgaattttttctggtggtaaactcgtatcgccatcatcaatccacgcctgcagcaggctagaacggtttccctggttcatcaactgcaccatcacttctttattttctgccgggtaaataatgcgcgtcccgtagataacaattccggcatgtgcaggaaggaccatagaaaaaatgagtaaagataataatcctttcattttaatgcctcttaaattaaaaggccgccatgggatagcggccatgtttattacctggagaaacttacaattttatttattaatcctgcgccacacgcataaccagagaagataacacatcaccactttgcacactgttatctgtcagtttcaggtattttgctttaaacggaatagcatattgaccttccgctgttttataactctcaatgttaaaaggtgcagaaacatccaggacatcgctgttatcacctaaatagagatagtaacccacggtatcgttgctactggctatcgccttatcgttaccggttattttatcgttggtaatcaagctgagttttacaccagcaacttctttcgggcagctaatttttaacatgctgctggttacaccgactgcatcatcataggtagaatatttagctttaccttcaaagacactggttggtacagtcggcatattaatacttacactatcaccacccgcttcgaatttacacggagattctgcaatattccccttaatagttaatgttccggtatcaacgtctgcagcaaatactccagcgctcataaaaaaagaagaaaagacagcggcagcaataatactacgtttcataatatgttccttaataaaatttatttttggttgttaagagtctgtatctcttggaaacaaatttctcacatcaaaaaagttgccgcaatgtaaacacattgttttattgatttaaaacaaattaaccattgcaatataaatacaaaaaatatttaagagtattaactatttatcgcatctatcaattaatgtagatttatgtaaatggtattgttgatatcaataaaaaagccgaaatcatttatataaatgatttcggctttctaaatgcaattaaaatcaggttgccaaattaatcgtagcgatttaacacgattcgacgtttgctatcgctacctgcaacaaccacttctgtcgttacacctttgacggggctagaaaacagatgacgggtgtcaacattatacgttaactgaccacaatgctgttgaggttgaccattaaccatagccatactgcatgttgggggactgatcctgccattaatcgctaatgtggcagtctcactagagaatgcgggagaagccaatccataggcaagaaaaataattccactcagccaatacttattcattgaacgttatccctgtagtaaaggttatgcctggatagaatgagtgcataacaaactatagctgtacatccactacacagccacgaaggatgataatgaagcattgcctgtatgatcaatcgactttgtagagtttcggacgaaggtccgcagaatattcgcagtattaaataagtgttcattaatgcggcaaaaactaatacaccgcatcaatgtaacatctctgcggtgtatgaagaataaccagaatggttaataggcgttagaccgcgcggaaggaaatctcgcctggaatgacttcaccctgccagtagagctgagctgcaacgcggtcagccagctggcggtagatagcggtaaattcgctctccggacggctgataaccgttggcgtacctttatcgagatcctcacgtaaggagatgtgtaacggcatctgccccagcagctgtgtatggtatttttcagccagtttctctgcaccaccggtaccgaaaatcggttcatggtgaccacagttactgcaaatatgcacactcatgttctcgacaataccgagcaccggaacctcgactttctcgaacatcacaatgccttttttcgcatcgatcagcgcgatgtcctgcggggtggtgaccacgactgcaccggttactggaatgttttgcgccagcgtcaattgaatgtcaccggtgcctggcggcatatcaagcaccagatagtcgagatccggccacaaggtttcctgcaacatctgcattaacgccttgctcgccatcggtccacgccacaccatcgcattgtcgtcagtgaccagataaccaatactattggttgccaggccatgagacataatcggtgccatatgggtaccgtccgggctagttggacgctgattttctgcgcccaacattgttgggatacttgggccgtagatatcggcgtccagaatgccgactttcgccccttctgccgccagcgccagtgccaggtttaccgccgtggagcttttacccacgccgcctttaccggaactcaccgcgataatgttcttcacaccgttaattcccggctgattcttcacgcgtttcagagtggctatgttatggctcagtttccagtcgatagctttcgccccggtgatgcgcagcagttcggcgctacattgctcttttaactcttcgaacgcgctatgccagacaaacggcataaccagttccacatgcaacgtgtcgtccatccaggcgacatggtgcaacgctttcagcgtggtgaggttatgcttcagggttgggtgctgaaaattggccagtgtcccggcgaccattgcgcgcaaggcttctggacttttggcctgggattgttcgttcatcccgactccttttttgtatagataaaccatcagctgatagtttacctgaagaatatagagaagtacttacttaacattttcccatttggtactatctaaccccttttcactattaagaagtaatgcctactatgactcaagtcgcgaagaaaattctggtgacgtgcgcactgccgtacgctaacggcagtatccacctcggccatatgctggagcacatccaggctgatgtctgggtccgttaccagcgaatgcgcggccacgaggtcaacttcatctgcgccgacgatgcccacggtacaccgatcatgctgaaagctcagcagcttggtatcaccccggagcagatgattggcgaaatgagtcaggagcatcagactgatttcgcaggctttaacatcagctatgacaactatcacagcacgcacagcgaagagaaccgccagttgagtgaacttatctactctcgcctgaaagaaaacggttttattaaaaaccgcaccatctctcagctgtacgatccggaaaaaggcatgttcctgccggaccgttttgtgaaaggcacctgcccgaaatgtaaatccccggatcaatacggcgataactgcgaagtctgcggcgcgacctacagcccgactgaactgatcgagccgaaaagcgtggtttctggcgctacgccggtaatgcgtgattctgaacacttcttctttgatctgccctctttcagcgaaatgttgcaggcatggacccgcagcggtgcgttgcaggagcaggtggcaaataaaatgcaggagtggtttgaatctggcctgcaacagtgggatatctcccgcgacgccccttacttcggttttgaaattccgaacgcgccgggcaaatatttctacgtctggctggacgcaccgattggctacatgggttctttcaagaatctgtgcgacaagcgcggcgacagcgtaagcttcgatgaatactggaagaaagactccaccgccgagctgtaccacttcatcggtaaagatattgtttacttccacagcctgttctggcctgccatgctggaaggcagcaacttccgcaagccgtccaacctgtttgttcatggctatgtgacggtgaacggcgcaaagatgtccaagtctcgcggcacctttattaaagccagcacctggctgaatcattttgacgcagacagcctgcgttactactacactgcgaaactctctagccgcattgatgatatcgatctcaacctggaagatttcgttcagcgtgtgaatgccgatatcgttaacaaagtggttaacctggcctcccgtaatgcgggctttatcaacaagcgttttgacggcgtgctggcaagcgaactggctgacccgcagttgtacaaaaccttcactgatgccgctgaagtgattggtgaagcgtgggaaagccgtgaatttggtaaagccgtgcgcgaaatcatggcgctggctgatctggctaaccgctatgtcgatgaacaggctccgtgggtggtggcgaaacaggaaggccgcgatgccgacctgcaggcaatttgcagtatgggcatcaacctgttccgcgtgctgatgacttacctgaagccggtactgccgaaactgaccgagcgtgcagaagcattcctcaatacggaactgacctgggatggtatccagcaaccgctgctgggccacaaagtgaatccgttcaaggcgctgtataaccgcatcgatatgaggcaggttgaagcactggtggaagcctctaaagaagaagtaaaagccgctgccgcgccggtaactggcccgctggcagatgatccgattcaggaaaccatcacctttgacgacttcgctaaagttgacctgcgcgtggcgctgattgaaaacgcagagtttgttgaaggttctgacaaactgctgcgcctgacgctggatctcggcggtgaaaaacgcaatgtcttctccggtattcgttctgcttacccggatccgcaggcactgattggtcgtcacaccattatggtggctaacctggcaccacgtaaaatgcgcttcggtatctctgaaggcatggtgatggctgccggtcctggcgggaaagatattttcctgctaagcccggatgccggtgctaaaccgggtcatcaggtgaaataatcccccttcaaggcgctgcatcgacagcgccttttctttataaattcctaaagttgttttcttgcgattttgtctctctctaacccgcataaatactggtagcatctgcattcaactggataaaattacagggatgcagaatgagacactttatctatcaggacgaaaaatcacataaattcagggcagttgagcaacagggaaacgagttgcatatcagttggggaaaagttggcaccaaagggcaaagccagataaaaagtttttcagatgctgcggcagcggcaaaagcggagcttaagctgattgcggagaaggtgaagaaggggtatgtggagcaagcgaaggataattctttgcaaccttcccaaacggtaacgggctctctcaaggtagcggacttatccaccattattcaggaacaaccctctttcgtagcagaaacccgtgcgcctgacaaaaatacagatgctgttttaccgtggctggcgaaagatattgctgtcgtttttccgcccgaagttgtacacaccacgttaagtcatcgccgctttcccggagttcctgttcagcaagcagacaaattgccccaattacgtcgcttagcctgtagtgtgtcgcaacgggataataaaacagccacatttgacttcagcgcctgttctttagaatggcaaaacaccgtcgcccaggcgatcagtcagatcgacggcctgaaaacaacacagttaccatcaccagtaatggctgtactcacggcacttgaaatgaaatgcacaagatataaagtgcgtgaggatgttatggatcagatcgtccaggaaggcggtctggaatatgctactgatgtaataatacaccttcaacagattgatattgaatgggattatgcgaataatgtcattattattctgccgtctggcattgcacctagctacttggagcaatattccagatttgaatgacgcctacgtaaacatttatcactgacggaagagtctctctggcaaaaatgtgcacaaaaacttattgccgcaattccacatattccagaatggcggcaaccattaattgctttgttattacccgaaaaaccagaaattgcacatgaaattgcccagcgtctactggggcaaaaaaaattaccctcgcttgagtggttaaaaatagtggcgactgatgagcacattcttgcctcattagaaaaatatcacgaaccatatgccatttttgatgattactattgtggtgcgatatggtcagccaccgtattacaggagcaaggtgttgcagccctgccccgatttgctccctatgccgcaagtgactactgcgccgatgtgttgcgtcatatcaatcatccgttcgcattgacactgcttatacgtgtagccgggcaaactaaacgctgtcacgatcggatgacgaaagccattgctgcgttcccacatgcagcaatggcggcactgacggaacttcttgggcaaaaagaagagaacagttggcgcattatgctaatgacaatgcttatctcacaaccagcactggcagaacaggtcattccctggctctcgacacccgcagttgccgtactgaaatcatgccagcaacaactgacacagccctcaaaccatgccagcgccgatctactgccagccgtagtagtctcccctccctggctttcgaaaaagaaaaaatcgccgattccggtgctggatttagcgccattaggcattgagccaatctgttatctgacagaagaaatcagtaatcaacttttggcgaaatatatctggtattcaaaacacatcacggttagccatgaagaaagtactaccaacctgttggcaaggatgggttttcaacgacggatcgctggtacatatattaaagctcccgaagcggtagttgaggcatggctaaatgaagattattcaaccttactaagtgaatttaaggtgtttcattcacctaccgggcattattggcagttggggattttgacaacattgccgctggagaaagcagtaaaagcatggaatgcccttaccctatctccacataccgataccgaatactccatgttacattttggactcaaagggttacctgggttagtaaactcacttgcacgctatccacaagaagccttgcccatcacgaattacttcgcagcgagtgagctggctcctgccgtcgcccgtgccttcaacaaactgaaaacgctacgcgaaaacgcccgtagctggctgttgaaatacccggaacatgcccttaccggcctgctgcctgcggcgctcggcaaagccggtgaagcacaggataacgcccgcgctgccttgcgtatgcttaccgaaaacggtcatcagccattactgcaagaaatcgcccgacgttataaccagccggaagtaaccgatgcggtgaacgctctgcttgcgctcgatcccttagataatcacccgacaaaaatccccactcttccggccttttatcagccatcgctctggacgcgcccggtattaaaagcaaatgcccaatcactgccagatagcgccctcctccaccttcggtgaaatgctccgcttccctcaggaagaggctctgtatccgggattattgcaggtgaaagacgtctgttccgccgactcactggcgggatttgcctgggatctgtttaccgcctggcagaccgctggcgcgccgtcgaaagagagttgggcgttcactgcgttaggcgttctcggtaacgatgacaccgcccgcaaactgacgccattaatacgcgcctggcctggtgaatcccagcataaacgcgccaccgttgggttggatattctcgctgctatcggtagtgatatcgcccttatgcagcttaacggcatcgcccagaaactgaaattcaaagcattacaggagcgggcaaaagaaaaaattgccgacattgccgagagccgcgaactcacggtggcggagcttgaagatcgggttagcaccggatctcggtctggatgataacggttcgctgctgctggattttggcccacggcagttcaccgtcagctttgatgaaaccttaaaaccgtttgtgcgtgatgtttccggcagccgcctgaaagacctgcccaaaccgaacaaaagcgatgatgaaacgcgggcgaacgatgcggttaaccgctacaaattgctgaaaaaagatgcgcgtaccatcgccgcccagcaggtagcaaggctggaatccgccatgtgcctgcgccgccgctggtcgctggaaaacttccagctcttcctggttgagcatccgctggttcgtcacttaacccgccgtctgatttggggcgtttatagcgccgaaaaccagctactggcttgctttcgcgtagcagaagataacagctccagcaccgctgacgatgatcttttcaccctgccggaaggcgatatctctatcggcactcctcacgttctggaaatatcaccaacggatgctgccgcctttggtcagctttttgccgactacgaactgctaccaccgttccgccagctcgaccgtaacagctacgccctgacagaagccgagcgcaatgccagtgaactgacccgctgggcaggcagaaaatgcccgagtggtcgggtcatggggctggcgaataaaggctggataaagggcgaaccacaggatggaggctggatcggatggatgatcaaacctttgggtcgctggtcgttaatcatggaaatcgatgaaggctttgcggtaggcatgtcgccagccgaactcagcgctgagcagctcttaagcaagctgtggctatgggaaggcaaagcagaaagatatggctgggggagtaattcaacacaggaagcgcagttctccgtaatcgatgccatcaccgccagcgagctaattaacgatattgaagccctgtttgaataaggaaagagcatggacaaggaattaccgtggctggcggataacgcccaactggaactgaaatataaaaaaggcaaaacgccgctcagtcatcgtcgctggccgggcgaaccagtgtccgttatcactggaagtctcatccagacattgggtgatgaattgctacaaaaagctgagaagaaaaaaaacattgtctggcgttatgagaattttagtctggagtggcagtccgccatcacgcaggccatcaacttgatcggcgaacacaaacccagtatcccggcccggacaatggcggcgctagcctgtatcgcgcaaaatgacagccaacagttgctcgacgaaatcgtccaacaagaggggctggaatatgcgactgaggtggtgattgcacgccagtttattgcgcggtgttatgagagtgatcctctggtagtgacattgcagtatcaggacgaggattatggctatggttatcgcagtgaaacctataacgaattcgatctccgactgcgtaagcatctctctctggcagaggaaagctgctggcagcgttgcgccgacaaactcattgccgcactaccaggaataaacaaagttcgccgcccttttattgcgctgatcctcccggaaaaaccagaaatagccaatgagttggtaggccttgaatgcccgcgaactcattttcattctaaggagtggttaaaagttgttgctaatgaccccacagcggtgagaaaactcgaacactactggagccaggatatatttagcgatcgagaagccagctacatgagccatgaaaaccacttcggctacgcggcctgcgccgcccttttgcgcgaacaaggactggcagccattccgcgcctcgcgatgtatgcccataaagaagattgcggcagtctgctggtacaaattaaccatccgcaagtcatccgcaccttgctactggtggctgataaaaacaaacccagcctgcaacgtgtagctaaataccataaaaacttcccccatgcgacgctcgccgcactggcagaactgctggcgttaacagaaccaccagcccgccctggttatccaatcatcgaagacaaaaagctgcctgcacagcaaaaagcacgcgatgaatactggcgtacgctgttacaaacgctgatggcaagccagccacaactggcagcagaagtgatgccgtggttaagtactcaaccccagagtgtgctgaagagttatttaagcgcaccgcccaaaccggttattgatggcaccgataacagcaatctgccagaaatcctcgttagtccaccgtggcgtagtaagaaaaaaatgacagctccacgtcttgatttggcaccgctcgaattaactccgcaagtttactggcaaccaggcgaacaagagaggcttgccgccactgagcctgcccgttatttcagcacggaatctcttgcgcaacgcatggaacaaaaaagtggacgagttgtattacaggaactgggttttggggatgatgtatggctgtttctgaattatatactccccggaaaactggatgctgcacgcaatagtctctttgttcagtggcattactaccaggggcgggttgaagagatcctgaatggctggaactccccggaagcacaattagcagaacaggcgctccgcagcggtcacatagaagcgttaattaacatatgggaaaatgacaactacagtcattatcgtccggaaaagagtgtctggaacctgtatttattggcacagttgccgcgtgagatggctttgaccttctggctgcgtatcaatgagaaaaagcatctgttcgcgggtgaggactattttctcagtatcctcggattggatgcgctaccaggtctgctgttggcttttagtcatcgtccaaaagaaacatttccgttaattttaaattttggcgcaacagaactggcgctgcctgttgcccacgtctggcgacgtttcgcggcgcagcgtgatctggctcgccagtggattttacaatggccggaacatacggctagtgcacttatccctcttgtctttaccaaacccagcgataatagcgaagccgcattacttgccctgcgtttactgtacgaacagggacatggcgaattgctacaaaccgtggcaaaccgctggcagcgtacagatgtatggtctgccctggagcagttgcttaaacagggtccaatggacatttacccggcacgcattccaaaagcccctgatttctggcatccgcaaatgtggtccaggccgcgccttatcactaataatcaaactgttaccaatgacgctctggaaattatcggcgaaatgctgcgctttacccaggggggacgtttttatagcgggctggaacaactgaaaacgttctgccagccacaaacgctggcagcttttgcctgggatctcttcactgcgtggcaacaagctggtgcccccgcaaaagacaactgggcatttctggcgttaagtctctttggtgacgaaagcacggcacgggatctgacgacacagatcctcgcctggccacaagaaggcaaatctgcccgtgctgtcagcggcctgaacatccttaccctgatgaataatgatatggcgctgatacagctgcatcatataagccaacgggctaaatcccgccccttacgtgataacgcggcggaatttcttcaggtggtcgcagaaaatcgcgggctaagccaggaagagctagcggacagattagtcccaaccctgggccttgatgatccgcaggcgttgagttttgattttggtccccggcagtttaccgttcgcttcgatgaaaatctcaacccggttatctttgatcagcaaaacgttcgccagaaaagcgttccccgtttgcgcgccgatgacgatcaactgaaagcgcccgaggcactggcccgactaaaagggctaaaaaaagatgctactcaggtgagcaaaaacctgctcccgcgtcttgaaacggccctacgtaccacccgacgctggagcctggcagattttcattctctgtttgttaatcatccctttacccgtctggttacccagcgattaatatggggggtttatccggcaaatgaaccgcgttgtttactcaaagcctttcgtgtggccgcagagggggagttctgcaatgcgcaagatgagccaattgacctgcctgcggacgctctgattggcattgcccacccgttagaaatgacagcagaaatgcgcagtgaatttgcacagctttttgccgattacgaaattatgccgccttttcgccagttgagccgccgcacggtgctgctcacacctgacgagagtaccagtaacagcctgactcgctgggaaggtaaatccgctaccgttgggcaacttatgggaatgcgatacaaaggctgggagagtggctatgaggacgcatttgtctataacctgggtgagtaccggctggtccttaagtttagtcccggttttaaccactacaatgttgatagcaaagcgctaatgagcttccgttctcttcgagtgtaccgtgacaataaatccgtcacttttgccgaacttgatgtgtttgatttgagtgaggcgttaagcgcacctgacgtcattttccattaaaacacagcgggcagtgatgcaactgcccgttatcaacacgacttaccagcggggaaagcgatgatcgtgcaaaaagagctggttgctatttacgattatgaggtccctgtacctgaagatccgttttccttcagacttgagatccataaatgctctgaattatttacaggttccgtctatcgactggagcgattccggctacgtccaacatttcatcaacgtgatcgagaagatgctgacccgctaataaatgatgcgttgatttatataagagatgagtgtattgatgagcggaaattacgaggtgaaagtcctgaaactgtaatagcaatttttaatcgtgaactacagaatatattcaaccaagaaatagaataatatactctaaataattcaaattggtccgatccggcgcaacgtcccaatggcctggattataaatctcattatcttaattgcaacggggtccagccgtggttataattcgttcgttggaacacgatgttgcacaggctgtggtgttaggcctgaaaatagtaaataaaagaacctgcctcaccagcaggtttttttatttactgtgatctgctttccagatatttttcgctcaaacaactaatgcgccaaacatttattgcgcgtaaaatatcgtttatttcattaatacatttcagggatgaatatatgagtccgcagaataatcatctgcagcgtccgcctgctgctgtgttatacgccgatgaactggcaaaattaaaacaaaatgataacgcaccttgcccgcccggttggcagttaagtttgcctgcggcccgtgcttttatccttggcgacgaagcgcaaaatatcagccgtaaagtggtgattagcccctccgctgtcgaacgtatgttagtcactcttgctaccggccgcggtttgatgttggtgggggaaccgggtaccgcaaaatctcttctttctgaattactggcaaccgctattagcggcgatgccgggttaaccatccagggcggggcatctaccaccgaagatcaaatcaagtatggctggaactacgccctgcttatcaatcatggtccgagtacggaagcgctggtccctgccccgctttatcagggaatgcgcgacggcaaaatcgtccgtttcgaagagataacgcgtacaccgctggaagtgcaggactgtctgttaggtatgctttctgacagggtgatgacggggccggaactcactggtgaagccagtcagctctatgcgcgagaaggctttaatattattgccactgccaatacccgcgatcgcggcgtcaatgaaatgagtgctgcgctaaagcgtcgcttcgattttgaaacggtttttccgattatggatttcgcccaggagttggaactggtcgccagtgctagcgcgcgtttgctggcccatagcggtattccgcataaagtgcctgacgcggtactggaattactggtccgcaccttccgcgatctgcgtgccaacggcgaaaagaaaacgagtatggatacactgacagcgattatgtccaccgctgaagccgtgaacgtggcccatgctgtgggcgtccgcgcctggtttttagcgaatcgcgcgggggagcctgccgacctggtggaatgtattgccggaaccatcgtcaaagataacgaagaagatcgcgcgcgtctgcgccgttacttcgaacagcgtgtcgccacacataaagaagctcactggcaggcttattatcaagcccgccaccgcctgccgtgaggaaagatgcatgagcgagccgttaattgtcggcatccggcatcatagtccggcctgcgcccggctggtgaaaagcttaatcgaaagccagcggccacgatacgtgttgattgaaggcccggctgattttaatgaccgggtagacgaactgtttttagcccaccagcttccggtagctatttacagttattgccagtatcaggacggtgcagcccccgggcgtggtgcctggacgccatttgctgaatttagcccggagtggcaggcgctacaagccgcacgtcgcattcaggcacaaacttacttcatcgatttgccttgctgggcgcagagtgaagaagaggacgatagccctgatacgcaagatgaaagccaggccttactgctgcgtgccacccgcatggataacagcgataccctgtgggatcacttgttcgaagatgaaagccagcaaactgcattaccctctgcgctggcgcactattttgcccaactgcggggcgacgcctccggcgatgcgctcaatcgtcagcgcgaagcctttatggcccgctggattggatgggcgatgcagcaaaataatggcgacgtgttagttgtctgcggtggctggcacgctccggcactggcaaagatgtggcgcgaatgccctcagaaaattaacaagccagaattgcccagcctggcagatgccgttacaggttgttatctcacaccctacagtgaaaagcgccttgatgtgctggcaggataccttagtggaatgcctgccccggtatggcaaaactggtgctggcagtggggcttgcagaaggccggtgaacaactgctaaaaactatccttacccgtttgcgccagcacaaattgcccgcttctaccgcggatatggctgccgctcatctgcatgcgatggcgctggcacagttgcgcggtcatacactaccgttacgcactgactggctggatgccatagcaggcagcctgattaaagaagccctgaacgcgccgttgccgtggagctatcgcggcgttattcatcccgataccgatccgattctgctaacgttgatagacacattagcgggtgacggattcggtaaacttgccccttctacgccacaaccgcctctgccaaaagatgtcacctgcgaactggaacgtaccgcaatctcccttccggcggagcttaccttaaatcgctttacccccgatgggctggcgcaaagtcaggtgttacatcggctggcaatactggagatccctgggattgtacgccagcagggaagtacactgacacttgcaggcaacggtgaagaacgctggaaattaacccgcccgcttagccagcatgcggcattgattgaggccgcctgttttggtgccacactccaggaagccgcacgcaataaattagaagccgatatgctggacgcgggcggaatcggcagtatcaccacatgtcttagccaggcggcgttagcgggtctggcgtccttcagtcaacaattactggagcaactcacactattaatcgcccaggaaaatcaatttgccgaaatgggccaggcgctggaagtgctttatgccttatggcggctggatgaaattagcggtatgcaaggcgcgcagatattacaaacgacgttatgcgcgactatcgatcgcacgctgtggctgtgtgaatctaacggcagaccggatgaaaaggagtttcacgctcacctgcatagctggcaagcgctttgccatattctgcgcgatctacatagcggcgttaatttacccggcgtttctctttctgcggcggtagccttactggagcgacgcagtcaggcaattcatgccccggcgctggatcgcggcgcggctcttggcgcactaatgcgtctggaacatcccaacgccagtgccgaagcggcgctgacgatgctggcgcagttatccccggcacaatctggtgaggcgctgcacggtttgctggcgctggcccgccatcaactggcctgtcagccggcatttatcgccggtttcagcagtcatttaaatcaactgagtgaagccgattttattaacgccctgcccgatttacgcgcggcgatggcctggctaccaccacgagaacgcgggacgctggcgcatcaggtgcttgagcattatcaactggcgcaacttcccgttagcgcgctgcaaatgccgttgcattgtccaccacaggccattgcacatcatcaacaactcgaacagcaggcactggcaagcctgcaaaactggggagttttccatgtctgaactgaacgatcttctgaccacccgtgagctacaacgctggcgattaattcttggcgaagcggcagaaacgacgctttgtgggctggatgacaacgcccggcagatagaccacgcgctggagtggctgtatgggcgcgatcctgaacggctccagcgtggtgaacgttccggtggattaggtggcagtaatctcaccacccctgagtggatcaacagtattcacacgctgtttccgcagcaggtgattgagcggctggaaagcgatgccgtgctgcgctacggcattgaagatgtggtgacgaatctcgacgtgctggaacgtatgcagccttctgaaagcctgctacgcgctgttttgcacaccaaacatctgatgaaccccgaagtactggctgccgcccgccggatagtgtgccaggttgttgaagaaattatggctcgactggcaaaggaagttcgtcaggctttttctggtgtccgcgatcgccgtcgccgtagttttattccactggcgcgaaactttgatttcaaaagtactctgcgcgccaacctgcaacactggcacccgcaacacggcaagttgtatatcgaatccccccgctttaacagccgcattaaacgccaaagcgaacaatggcaactggtcttactggttgatcaaagcggaagcatggtcgatagcgtgatccactctgcggtgatggcggcctgtttgtggcagttacccggcattcgtacccatctggtggcgtttgacacaagcgtcgttgatctcacggcagacgttgccgatccggtagagttattaatgaaagtacagttgggcggcgggaccaatatcgccagtgccgtggagtatggtcggcaacttattgaacaaccagcgaaaagcgtcattatcctcgtgagcgatttttacgaagggggtagtagtagtttactgacgcatcaggtgaaaaagtgtgtccagagcggcatcaaagtgctgggactggcagcgctcgatagcaccgcaacaccttgctatgaccgcgatacggcccaggcgctggttaatgtcggcgcacaaatagccgccatgacgccgggcgagctggcaagttggcttgcggagaatcttcagagttgacataacttgcggagaatcttcagtcatgaatagtctacgtccggaattattagaactgacaccgcaggccctgacggcgttaagcaatgccggttttgttaagcgcagtcttaaggaactggaaaatggcaacgtcccggagatcagccatgagaacgacgctttaatcgccaccttcagtgacggtgtccgtacccagctggcgaacggccaggcactgaaagaggctcagtgcagttgcggggccaacggtatgtgccgtcatcgcgtgatgctggtgttaagttatcaacgactttgtgccaccactcagtctacggaaaaagaagaagagtgggatccggcaatctggctggaagaactggctacccttcccgatgctacccgcaaacgcgcacaggcgctggtcgctaaaggcatcaccattgagttgttctgtgcgccgggtgaaattccctctgcccgcttaccgatgagcgatgtgcgtttttattcccgcagcagtattcgtttcgcccgttgtgattgtattgaaggcacactttgcgaacatgtcgtactggcggtacaggccttcgtcgaggccaaagcgcagcaagcagaatttaaccatttaatctggcagatgcgcagcgaacacgtcacaagttctgacgatccgtttgccagcgaagaaggcaacgcgtgtcgtcaatatgttcagcaattaagccagacattatggcttggcggcatcagccagccgctcatccattacgaggcagcattcaaccgcgcattgcaggcggcagagacctgcaactggcgctgggtgagtgaaagcctacggcaactgcgcgccagcgttgatgccttccacgcccgcgccagccactataatgccggagaatgcttacatcagcttgcggcattaaacagtcgattaaattgcgcacaagagatggcccggcgcgacagtattggtgaagttcctcctgtgccgtggcgcacggtcgttggctctggcattgccggagaagcaaagcttgatcatctgcggctggtgtctttaggtatgcgttgctggcaggatattgagcattatggtttacgcatctggtttaccgatcccgacaccggcagtattttgcaccttagccgcagttggccgcgaagtgaacaggaaaacagtccggcagctacgcgtcggctgtttagttttcaggctggcgcactggcgggcgggcaaattgttagtcaagcagcaaaacgcagtgccgatggcgagctgctgttagctacccgcaaccgcttaagcagcgttgtgccgctgagccctgatgcctggcaaatgttgagcgcgccgttacgccagccgggcattgtggctttgcgggaatatttacgccagcgtccccccgcctgcatacggcctcttaatcaggtcgataacttatttattctgccggtcgctgagtgtattagcctcggttgggacagcagccgccagacgctggatgcgcaggtcattagcggcgaaggggaagataatgtgctgacgttaagtttaccagccagtgccagcgcaccttatgccgttgaacgcatggcggcgcttttgcaacaaacagacgaccccgtgtgtctggtttctggctttgtcagttttgttgaagggcaattgacactggaaccacgggtgatgatgacaaaaacccgtgcctgggcgctggacgcagaaactacgcctgtggcaccgctaccttctgccagcgttttgcctgtgccgtctactgctcatcagttgctgatacgctgccaggcgttacttattcaactgctccataacggctggcgctatcaggaacagagtgctattggtcaggcataattgctggcgaatgacctcaccgcggtgggtttttatcggctggcacatgtgttgggacaatttcgtaatacagaaagcgaggcacgggtagaagcaatgaataacggtgttttgctttgcgaacaattattccccatgcttcagcaacaaggatgaaatagtgctttttactaagagttctactccagttccggactgctcacgccacggtattaggcatatcctatatagcccctggtgagagtcaccagttccttgattaaataaaatggagttttacatgaaggctttcaataagctgttttccctcgttgttgcatctgttctggttttctctcttgctggctgcggtgacaaagaagaaagcaagaaattcagcgccaatctgaacggcactgaaattgccattacctatgtctacaaaggtgacaaggtgcttaagcaatcttctgaaaccaaaattcaatttgcctccattggtgcaaccaccaaagaagatgctgccaagacacttgagccgttaagcgccaaatacaaaaacatcgcgggtgttgaagaaaaattaacctataccgatacctacgcgcaggaaaacgtgactatcgatatggaaaaagtggattttaaagccctgcagggtattagtggaatcaacgtttctgctgaagatgccaaaaaaggtatcactatggcgcaaatggaactggtgatgaaagccgctggttttaaagaagtgaaataatcggttggcggtcatgctctaaacatgaccgccaattttttagccttttttcacatgctggcgcgctgccagtccacgcagaaaataacgtaaaaattgatcgccgcattcgcggaagtttttatgatccggtgcgcgcatcatcgctgtaatttccggcatgctaacgcggaactgctgttcggtgaggatagccagaatgtcatcggttttcaggctaaacgcgatgcgtaattttttcagcacgatgttgttattaatgcgacgttccggctccagtgccggagcagactcatccttgccgcgtttttcataaatcaggccattgaggaaactgctcaaaacaatgtccggacaacgctgaaaaccctcttcgtcttctttacgtagccagacggcgatctgttccgcggtggcttcgacattacccagcgccagaatacgcaccaggtcattattattggctttcaaaatgtagcgcacgctgcgcagaatatcgttacttagcatgaggccttcaggtgttgatgaggcaaaaagccattttagcagtcttttacaggccaatcgcctcttttaagcttttcagataacggcggctgaccggcacggttaagccattacgcaaaatcaactcggcctggccgttatcttccagacgaatctcctgtaaatgcgcgaggttaaccagatactgacgatggcagcgcagtagtggtgtacgactttccagggtacgtaatgtcaattcggtaaagccctctttcccttcgtggctggtaacgtagacaccgctcatccgactgctgacaaatgccacatctttcatttgcagcaaataaatccgactatgccccgtacaagggataaatttcagcgcctgttgattttccggtaacaggctaacatcctgcttgctgcgctcctgacgcaatcgcgccagcgttttctccagtcgcgcttcatcaattggcttcagcagataatcaaaggcatgttcttcaaaggctttaattgcgtattcgtcaaacgcagtgagaaaaacaatatacgggcgatgttccgggtcaagcatccccaccatttccagaccactgatgcgcggcatctggatatcgagaaacagcacatccgggcgcagtttatgcaccgcgccgatcccttccacggcgttactacactctccaacgatttcaatatcgctctgctcctgcaaaaatacacgcaggttctcccgtgctaacggttcatcatcgacaattaagactttaatcatgcctcgtccctccatggtagtcgtaacgttattcgggtgtaactatcaggctcacaggcgacgcttattccatagtcatcgccaaaccgttcacgtaaacgcttatccaccagattcatccccagcccactggcattggttaccggttgatacaaaccggcattgtcttcgatctccagcatcaaatgttgcccctcacgtcgggcgctgattgccactcgccctgtatccagcagttgacttgtcccatgtttaatggcgttttccactatcggttgcagggtaaacgcgggcaattgctgctgggataattcttgcggaatagcaatgttgacctgcaaccggctctggaagcgcgccttttcaatttgcagataagcattcacatgttcaatttcgtcggcgagagtaacaaactcgctaggccgctttaagtttttgcggaaaaaagtggaaagatactgcaccagctggctggcctgttcgctgtcgcggcggatcaccgctttaatggtgttaagcgcattaaacaaaaaatggggattcacctgggcgtgaagcagtttgatctcactctgggtgagcatcgctttttgccgctcatattgcccggcaaggatctgcgcgctaagcaattgcgcaatcccctcacccaacgtgcggttgatgctactgaataaacggtttttggcttcatacaatttgatggtgcccatcacccgctgattttcaccacgcaacggaattaccagcgtgctccccagtttgcattgcggatgcaaagagcaacggtaaggtacttcgttgccatcagcgtagaccacttcaccggtttcaatcgcttttaaagtataagtactagaaatcggtttgccgggtaaatggtggtcgtcaccaattccggtaaaggccagcaatttctctcgatcggtaatcgcgactgcaccaatatccagttcctgatacagcacctgagccactttcatgctgttcacttcgttaaacccctggcgcaaaatgccttccgtgctggctgccactttcagcgcagtggcagaaaaagcgctagtgtatttttcaaacatcgcgcgtttatcgagcaatatacgcataaacagcgccgcgccgacggtattggtgaccatcattggcgcagcaatattactcaccagacgcaccgcatcttcataaggtcgggcgatcgcaaggatgatcagcatttgcaccatttcagcgacgaacgtgacggcaccggcggtaatggggttaaagactttatcagtgcgcccgcggcggatcaggatgctgtgtaccaggccaccgagtaatccttcaacgatggtgctgatcatgcaacttaacgcggtcatgccccccatgctatatcgatgtaagccgccggtcagcccaaccagcccaccgacgaccggaccgccgagtaagccgcccattaccgcgcctatcgcacgggtattggcaatagaatcgtcaatgtgcaacccaaaccaggtgcccatgatgcagaagatggaaaagacgatgtagcagagaaatttatgcggcagacgaaccgtgacctgcattaacggtatgaataatggcgttttactcattaaccatgcaatgactaaaaaaacgcacatctgctgaagcagcagcaacaccagattaaaatcgtacatacccgcaaaccacacttccctttaaaacgcgtaacatacattgcctgcgtttaactttctttgaactcttgcagaaaaatgagaattcgtgagtacgatcactcaaaatcgcctggcaaaaataaaatcaccctatagatgcacaaaaaacgggcaaaactacctggttcgcaaaactgcgtctaaagttaaaccgggacctcgcgagcaagggtgagacgatggcgctttacacaattggtgaagtggcgttgctttgtgatattaatcctgtcacgttacgcgcgtggcagaggcgttacggattgctgaaaccgcaacggacagacggcggtcatcggctgttcaacgatgccgatattgaccggatccgcgagatcaaacgctggatcgacaacggcgtgcaggtcagcaaagttaaaatgctgctcagtaatgaaaatgttgatgtgcagaacggctggcgcgatcagcaagaaacattactgacttacctgcaaagcggcaatctacatagcctgcgaacgtggatcaaagagcgcggtcaggattaccccgcccagacactcaccacacatctgtttattcctctgcgccgacggcttcagtgccaacaaccgactctccaggcgctgctggcgatcctcgacggcgtactgatcaactacatcgccatttgtctggctagcgcacgtaaaaaacagggtaaagatgcgctggtggttggctggaatattcaggataccacccgtctgtggctggagggctggattgccagtcaacaaggatggcgcattgatgtcctcgcccacagcctcaatcaactacgccctgaactattcgaaggccgtacattgctggtgtggtgcggtgaaaatcgaacctccgcccaacagcagcaactcaccagttggcaagaacaaggccatgatattttcccactcggcatttaatgattcgttaacaaatgcgctttactgtacaatcctttcgttaacataaggagtgcattatgcgcatagctaaaattggggtcatcgccctgttcctgtttatggcgttaggcggaattggtggcgtcatgctcgcaggttatacctttattttgcgtgctggctaagcgcctgcaccagcctttcaaacaggcggtctgcgatgatcgccgccagtgccaccagtaacgccccctggatcacatacgcggtattaaatccgctaagcccgatgatgatgggcgtacccagcgtgctggcccctaccgtactggcgatcgtcgccgtaccaatgttgataatcacgctagttcgcacgcccgccagaatcaccggagccgccagcggtagctcgaccttacgcactcgctgaccacgactcattcccatacctttcgcaacttctgtcacgctggcatcaatcgctcccagcccggcaagtgtcgcctgcaggacgggcagcacaccgtaaaggatcaaggcgataatcgctggttgcagaccaaagccgatcaccggaacggcgatcgccagcactgcgacgggcggaaaagtctgtccaacggcggcaatagtttccaccagtgggcgaaattccgcgccccacgggcgagtgacagcaattccggcaccagtgccaatgatcaccgcaaacaaactgctaattcccaccagccagaaatgagccagtgccagagctgcaaaactttcttgctgataaacgggtcgtggcagttgtgggaacaaggcagcaaacagcggctggctgtaaggcagccagaaaatcagcgccacaaacagagcaatgagccagaacagcggatcgcgcaacatcttcatacgcttacgcctccaccagcagatcctgaaaatgcagcgtgccgcaaggctggccctgcatgttcaccaccggcagcacctcgcatccccgcgcaacaaacagagagagcgcatcgcgtagcgtcatctcttctgccagtgcctcaccatctgctcgttcttcgcgacgcacgtaatccgccacactacgtaagctaagcaggcgcacacccagttcactacgtccaaaaaactggcggacaaaatcattcgccggacgagtcagcatcgtcagcggattgccctgctgcactacttcaccgtgatccatcaataccagatgttctgccagccgtagcgcctcatcaatatcatgagtgaccagcacaatggtacgccccagcaaacggtgaatgcgcgtcatctcttgttgcaacgcgccgcgcgttaccgggtccagtgcgccaaaaggttcatccattagtaagacttgcggatcggcagccagtgcacgcgccactcccacacgttgctgctgaccaccggaaagctgatgcggataacgctcacgcaaattactctccagccccagtagcgccattaattcgtcgatacgatcgtcaatccgcgcccggctccatttttgtaattgcggcacggtagcgatgttttgcgccacgctccagtgggggaacaggccaatagattgaatggcatagcccatccggcggcgcaactccagtactggcaggctgcgaatttcttctccggcaaagcggatctctccgctgtcatgctccaccaggcggttaatcattttcagggtggtggatttgccggagccagatgtgccaatcagcacgctaaaactcccttcctgaaaattgagattgagatcgttaacggctttttgtgcgccgaacagtttgctgacatggctaaattcaatcattacgtttcaccttcagcagtgcgataagcaaatcgaacagcgcgtcggtaagcaccgccagaacaattaccgggatcacccccagcaacactaaatcaatggcgctgcttagcagcccctggaaaaccagcgcaccaaaaccgcctgcgccgattaacgccgcaatcaccgccatacctacagtttgcaccatcaccacccgcaggctgcgcagaaataccggtaacgccagcggtaactgaacatgcaggaaacgctgcgccccgctcatccccatcgctctggcgctttccagcacatcgcgcgggatctggttcaaaccgactaccacgccgcgcaccagcggcagcaaggcatagagcaccagcgcaatcagtgcgggtgtcattccggttcctgctatgccgagcgtccccagccacggaaaggccgtaaccagcgcggcaagcggcgcaatcaacaggccaaagagcgccacgctaggcacggtctgaatcacattgagcagagaaaaaattgccccctgccgagcagtggaaaagtagcaccagatgcccaacggcacaccaatcactaacgcaggcagcaccgcaccaaacagcaacgtcagatgttgtgccagcgcgtcgtcaaacacatcctgacggttggcgtattctttcattagactgagatcgttaagcgtgccggagtacagcaaccacagcggaataatggcaatctgcatatgcaacaaccagcgccacagcggatgcgtggagattcggcggatggcatcgctacaggccagcaatgccagcgccgcagccagccagaaaccactgccgaggctggtacgcgccagcgcactgccattttgcgccagttgggtcgccgcctttccagctccccacaccagcaatacgaagacgaattgcgccagaatgagtgcacaaatgctgccttttttaccgggaataaaacaggccgtcagccaggcgcaaccaacgcccaccagcatccagatcgtttgcggccacagctgccagagatgacgcccctcaccgctaactaaacgattaggcgcgtaactgataaacggcagcgccgctgcgattgccgtcagcaacagcagcagcgccagaacaggattaatacggaaataagtcacgggaaattacttcgtccaccctttttgtttcaggtagtcggcagccacttttttggcatccagtccttccacagcaatgctggcattcagttgctgcaatgtttttgcatcgaggctggcgaagactggctgtagccactgtgccatttgcggatactccctcaacacgctctcacgcaccactggtgcaggcgcgtagataggttgcacaccttgcggatcgcttaaggtttgcagccccagcgccgctaccgggccgtcagtgccgtaagccattgcagcattaacgccagaggtttgctgggcagcggctttgatcgtcaccgccgtgtcgccaccagccagactcagcaactgatcctgaccgagcttaaagccataggctttttcaaacgcgggtaacgcatcggcgcgttcgataaactctgcgctggctgccagtttgaaggtgccgccctcttgcagataacgactcaggtcggcaaggctagtgagtttatttttctctgccacatcctgacgcacggcgatagtccaggtgttatttgcaggcgcgggcgtcagccagattaacttgttgtgctcgctatcgagctttttgactttctcgtaaccttgctgcgcgtttttccacgctgcatcgttttcatctttaaagaagaaagcgccattgccggtatattccggatagatatccagttcaccggaagtaatcgccccgcgcaccacaggagtcgttccgagttgcactttattcaccgtcggtacgccgtggctttccagcacctgcaaaatgatattgccgagtagcgcaccttcggtatcgattttactaccgactttaacgggggaagccgcctgtagcggcaggctcacggctgccaacataaccagactacctgcccagagctttaagagtggcatgatgctttcctcattcttttactgttgttttcagcgaattaagagaaaagcatagttgataatggcggggttagcttgagcggaaggattcagttgcagaatcagataaatacttaagaggcatattcggtccggcgtttcctgccggatgcggcgcgagcgccttatccggcctacaaagggcgcaaacgtcgcgcccttactaaagcattacagcaactcaaactcgcctttcttaacgcgtgcggaatcagtgccgataaagacattgaacttgccaggctcggcgtcatatttcatctgttgattccagaacttcagcgcctcaatatcgatcgggaagctgacagtctgagtttcgcccggtttcagggtgattttctcaaagcctttcagctgtttcacagggcgactcatggaagccgtcacatcctgcaagtacatctgcactaccgtggcaccctcgcgcttaccggtgttcgtcacctgcacgctggcagtcactttgccgtcacgcttcatggtcggcgcagaaagtttcacatcagagacggtgaaagtggtgtagctcagcccatagccgaacggatacaacgccccgttagcttcatcaaaataacggctagtgtatttgttcggcttgtcggcattatacgggcgaccggtattcagatggctgtagtacaccgggatctgcccgacagaacgcgggaaggacattggcagcttgccggacgggttgtaatcgccaaacaatacatcggcaattgcattaccgccttcagtccccgcaaaccaggtttccagaatcgcatcagcctgctgatcttctttcaccagcgccagcggacgcccgttcatcagcaccagcaccagcggtttaccggtggctttcagcgccgcaatcaagtcacgttggctttgcggaatagtgatatcggtccggctggaggcttcgtgcgccatcccctgtgcttcaccgactacagccaccaccacatcagattgtttcgccgtctgcaccgcttcatcaatcatctcttgcgggctacgcggatcgactttgaccgcttcttcatactgattcaggaaatcgataatgcctttgtcactggtaacgttcgcccctttggcatacagcactttaccgttttcaccgacggcatttttaatcccggtcagtacggtcacggattgatcggcaacaccggctgcggaccagctgcccatcacgtcacgtttactgtccgccagtggcccaaccaccgcaatggtggcgctttttttcagcggtaacgtttcgagacggtttttcagcaacaccaagctttcgcgcgccacttcacgcgcttctttacggtgcaggcggctttcggcattggtatccaccgggtcagactctttcggccccaaatggctgtatgggtcgttaaacaaccccatatcatatttaacgttcagtacatggcgggcagcatcgtccagctctgccatcgtcactttgccggatttaatcaacccaggcagatacttgctgtagtactcgtcgctcatgctcatgttgattccggatttcagcgccacgcgcaccgcatcttccgggtctgccgccgtgccatgtttaatcagctctttgattgcaccgtgatcggaaacggtgatgcctttaaagccccactggtcgcgcagaacatctttcagcagccaggaatcggaggtggctggcgtgccgttcaggctgttcagcgccaccatcaccgcgccgctgcctgcgtccagccccgctttgtacggcggcatataatcattaaacaggcgctgcggactcatatcgacggtgttgtactctttaccgccttctaccgcgccgtatgcggcaaagtgtttgacgctggtcatcacgctgtagcgatctgccgggcttttaccctgcatcgcttccaccatggttttacccattgtactggtgagatacgtatcttcgccaaaaccttcggaagcacgtccccagcgcggatcgcggctgacatcgaccatcggtgcccaggtcatattcaggccatcatctgccgcttcataagcagagacacgtccgaccgttttcactgcatcgaggttaaaagagctggccagaccgaggctaatcgggaacaccgtgcgctgaccgtgcagcacgtcgtaagcaaagaaaagaggaattttcaggcggcttaattccatcacctgatcctgcatggcgcggatatcctgacgggttacggtgttgaaaatcgccccaacctgaccgtctttgatcatctcgcggatcgcctctttcgggttatccgggccgacgctgattaagcgcagctgaccaattttctcatcaactgtcattttcttaagcagttcggtgacgaacgcatcccgcgcttcgggcgttaatggatggttgccgaataaatcatccgccagtgctggctgcagggccagactcaccgcgattcctacactacatagccatttcatatggatttttcttcctttgttgcccgacgtggcagcgaaaatggtgcaaaaaccgtagtttgccataagcatgatggagagagaaaaagaatgctcagtttattgtctgaattttcaaaatattcactcgctgaattgttatacaaggcgctattctagtttgtgatattttttcgccaccacaaggagtggaaaatgtcttccatgacaacaactgataataaagcctttttgaatgaacttgctcgtctggtgggttctagtcacctgctcaccgatcccgcaaaaacggcccgctatcgcaagggcttccgttctggtcagggcgacgcgctggctgtcgttttccctggcagtctactagaattgtggcgggtgctgaaagcctgcgtcaccgccgacaaaattattctgatgcaggccgccaatacaggcctgaccgaaggaagcacgccaaacggtaacgattatgatcgcgatgtcgttatcatcagcaccctgcgtctcgacaagctgcacgttcttggcaagggcgaacaggtgctggcctatccgggcaccacgctctatagcctggaaaaagccctcaaaccgctgggacgcgaaccgcacagtgtgattggaagtagctgtataggcgcaagcgtcatcggcggtatttgtaacaactccggcggcagcctggtgcaacgtggcccggcgtataccgaaatgagcttattcgcgcgtataaatgaagacggcaaactgacgctggtgaaccatctggggattgatctgggcgaaacgccggagcagatccttagcaagctggatgatgatcgcatcaaagatgacgatgtgcgtcacgatggtcgtcacgcccacgattatgactatgtccaccgcgttcgtgatattgaagccgacacgcccgcacgttataacgccgatcctgatcggttatttgaatcttctggttgcgccgggaagctggcggtctttgcagtacgtcttgataccttcgaagcggaaaaaaatcagcaggtgttttatatcggcaccaaccagccggaagtgctgaccgaaatccgccgtcatattctggctaacttcgaaaatctgccggttgccggggaatatatgcaccgggatatctacgatattgcggaaaaatacggcaaagacaccttcctgatgattgataagttaggcaccgacaagatgccgttcttctttaatctcaagggacgcaccgatgcgatgctggagaaagtgaaattcttccgtccgcattttactgaccgtgcgatgcaaaaattcggtcacctgttccccagccatttaccgccgcgcatgaaaaactggcgcgataaatacgagcatcatctgctgttaaaaatggcgggcgatggcgtgggcgaagccaaaagctggctggtggattatttcaaacaggccgaaggcgatttctttgtctgtacgccggaggaaggcagcaaagcgtttttacaccgtttcgccgctgcgggcgcagcaattcgttatcaggcggtgcattccgatgaagtcgaagacattctggcgttggatatcgctctgcggcgtaacgacaccgagtggtatgagcatttaccgccggagatcgacagccagctggtgcacaagctctattacggccattttatgtgctatgtcttccatcaggattacatagtgaaaaaaggcgtggatgtgcatgcgttaaaagaacagatgctggaactgctacagcagcgcggcgcgcagtaccctgccgagcataacgtcggtcatttgtataaagcaccggagacgttgcagaagttctatcgcgagaacgatccgaccaacagcatgaatccggggatcggtaaaaccagtaaacggaaaaactggcaggaagtggagtaaaaattacggatggcagagtatcgccatccgaattcacttaatcgttctgtgccgtctgccccgccgccgccatttgggcggctttttgttttttatagctcaacgctgctgccggcacaggcatcactttaccggtttcaatccaggtacgcaggcggctggcatcggcaaaatgggtatatttgccaaacgcgtccatcactaccagcgccaccggtttattattgataaccgtacgcatcaccagacaatggcccgccgcattggtaaagccggttttggttaactgaatattccagttatcgcgatacaccagatgattagtattgcggaacggcagcgtatacgtcggattagagaaggttgccatatcttcccgggtagtacttaactgcccgatcaacggatattgtttgctggcaatgagcagtttggttaagtcacgggcagtactaacgttatgcacgctcaatccggtaggttcaacaaagcgcgtgttgttcattccgaggcttttcgctttcgcattcattgccttaataaaggctttgtaaccaccgggataatggtgcgcaaggcttgccgccgcgcggttttcactagacatcagcgccagcaacagcatatctttacggctgatttcgctattcagtcgtacgcggctatagacccctttcatctccggcgtctggctgatatccacttttagtttttcatccagcggcagtcgtgcatccagcacaaccatcgcggtcattaatttgctgatagacgcaatcggacgcaccagatccgggtggttgctatagatcactttgttggtattcagatcaacaatcatcgcgctaccggaggcaatttccggttgactagcggtggtagcggctgccgttttcgcaacggcctgcggtgcaaaaggcacagccagcatcagggccaggctaaataaagaaactcgaaatttcggcatgatgagcattcagatagtggttcacgcgcacgggttgcgcaccgccggagtaaggatttactgaggctagcgacgccatcataacgagcaaaaagtgcgatcgtcaaaggagaatcgtgaggaaatgctgcattgctgacatttacgccagcaatgcaacgtcaaagaactttttagaacaaacgataaccgtagccccatagtataacggttagggcgagcagcacttccagtaccagcacgccaatcgccagcgtgctactagagaagctaaggccttcctctttgttgatattcaggaagctcggaataccaaggtaaagcaggtagccggtgtaaaacagcgccaccgtgccgaccagcgcacacaaccagaccagtggataaagcgccaccagaccgcttaaaaacagcggagttgcaacgtagcccgcgaagaccatgcagtgcgcaagactcggacgctgcggataattacgcgccatccaccagatgacccgccccatcaccgcgaccccagccagcataacgccgtaaaacaagacagccagcgccagtccggtaaaccaggataacttcaggatagtgccatcgccaaaattccagccaatctgtgtagtgccaatgaaggcgcaaatcaccggaatcgccgccatcagcaaaacgtggtgggtgtaatggtgagaaatcgtttcgttttcgcgattaatcacctgcatttcacgatcgggatgggaaaacagtccccagacatggctcataccgcccccttgttgtgagttcatgaacctgacagttcaagtataagtcagcttgtgattattttttgttcgcccatgtaattttcactgtctgatgaacgtcctttttcagcgtgaatgattcacagggtgtatgcttactggcaaccaaagggagacagactggcctatggatctcaatacacttatcagtcaatatggttatgccgcgctggtgatcggtagcctggcggaaggtgaaaccgtgactttgctgggaggcgttgcggcgcatcaggggctattaaagttcccgctggtggtactttctgtggcgcttggcggcatgattggcgaccaggtgctctatctgtgcgggcggcggtttggcggcaagctgttacgccgtttcagcaaacatcaggataaaattgagcgggcgcagaaacttatccaacgccatccgtatctgtttgtcattggtacgcgctttatgtatggctttcgggtgattggcccgacgctgattggtgccagccagctgccgccgaaaatctttctgccgctgaatattctcggcgcatttgcctgggcgttgatttttaccactattggttacgctggtggtcaggtgattgcgccgtggttgcacaatctcgaccagcatttgaagcactgggtctggttgattctggtcgtggttctggtggtgggcgtgcgctggtggctgaaacgacgcgggaagaaaaagccggatcatcaggcgtaaaaccattgccctggataaggcgttcgcgccgcatccgacatccggagtaccatgcctgatacgacgcttgtgcgtcttttcatgccgaccaaaatattacccaatgaaatatccacgcacctcactgcgttattctgggttgaactgtggattcgccaacataaagccgccatccactatcaagctctgcccggtggtgtaatttgcgccctcgctacaaagccacaccaccaggctggcaatctcatgcgttgcgccaaaacgccgcaagggaatgctaggctccgcgtcgggcttcacgtcgctgtcatccatgccattcattggcgtggcgatcgccccaggcgcgactgcgttcaccaaaatcttatgcctgaccagctccagcgccatcgctttggttaacccaccgagcgcatgtttagcggctgtgtaggcgctggcatccggcagcggcgtatgttcatgtacgctcgtaatgttgatgatgcgaccgccctgcccttgtttcaccatctgacgagccgcaatttggctgcataagaatgcaccatcgacatcaacggtaaaaatcttgcgccactcatcaaaagccatatcaagaaacggcgctttggtcattgcacccgcattattcaccagcacatcaatgcgccccagccgttgaatgagtttctccagcgccagtgccccttctggtagattgccgagatccagctgcacgatctccgcacgtacgccgtggctaactacctcacgcgcggtatcttttgccccttcttcatcactgtgccaggtaataccaatatcaaacccctgctgcgccagtaataacgcgcactctttgccgatcccgctatcggaggcggtaataatcgcaacctgtgccatcgagttctccacttaacgctgaataaacgttaagtatagaaggcgcatatcatcagcgtttgtaccccccgcccaacgcaccagtgagttgaatggaggcatccagccactgcccttgcaataacaggccattggcccgctcacgcagcgcggggattctggcttcgctgacgcgggaaccagcaatgatgcccgcgttaaagcgcgcctgcgcaagacctaccacacgcaaggcatcgcgctcaatttgcgcctgatgctggtttttctccgccagtgtctgaacctgactggctgcccgcgccacgtcattcaccgcttcaaccaccgctttgttgtagctggcgatagacaagttgctttcggcttttgcgatatcgagattggcgttaagacgaccactatcgaaaatgggtagcgtcaggcctgccgtaacgcccatttgctgcgcggaatgacggaacagatcgcttaagtgcaacgcatcctgttgcaggaaggccatcaggttgatgtcaggataaaatgccgcttttgccgcatcaatggtgcttaggctactctcaacgtaccagtgcgccgcctgcaaatctgcccgccgggccagtaaggagtaccccagttcatcaggaagctggcttgccactttcggcaacgcgaccggtttaagcttcaaactctttgtctggttatttgtaagtgcgcttaaccgtgcctcaataattttcattttccccgcgacatcgttgagctgctgccgggttttgctggcattaatatcggtttccacaccttcaacactagaagtaatcccgttctgatatagctggcgatcggtcgcgataatggtgttctgctctttttctatttgctgcaagaccgtgtttaacgccgcctgggtttgccactcccagtacaggcgggctacgctgccagccagcaattggcgggtttgctcgcgttccgccgcccgtgctttaaccgtacccaggcgggcagtaacctccgcccgattctttccccagatatcgagatgccagcccgccgttaagccaaaagtaccgttggtgtaccacgggccggtcgtacctgcggccggatcgttcagagcaaacggccccattaagccttctgcgctcattttttgccgctccatatccgccgaaaagtcgatctgcggaccatcctgagtggcaactgccttcgcctgggcttcagctagctgaatgcgctgttcagccacctgcatatccggtgcgttctgtagtgcattgttaattaaggaagactgttgattatcgtgatactccagccaccattggctgtctggccaaccattttcagcgccgtgggtaatgcggtgtcaacttgtgcagcgggcgtttgctggcttaacgcctggcgggtttcatgcataggcgcacacccggccagcatcagtaacagcggaaaacaggcgatggctggataaaaggaatcacgattcatgggggaataatcaggtaagaaaaggtgcgcggagattaccgtgtgttgcgatatattttttagtttcgcgtggcaatacatcagtggcaataaaacgacatatccagaaaaatatacactaagtgaatgatatcttccgatttatcttaatcgtttatggataacggcaaagggcttcgttttttcctatacttattcagcactcacaaataaaggaacgccaatgaaaattatactctgggctgtattgattattttcctgattgggctactggtggtgactggcgtatttaagatgatattttaaaattaattaatgtcatcaggtccgaaaataacgagaatatttcagtctctcatcctgttgcgctcctgtcatgtgcattgcttcatataatcactggcgcaaggagcgcgcagggggcggccaatcgccgccgccccctgcacccccgggctctggcgaacaaaatcgccgctgcgcggtgccctcggcttatcccttacggctaccgggtcgggcgcgaggtaacatccctgtaaaacgcgccctcagcccacatccatgtgggctgccccggccttcagggaacgcctcggcaattttgacgccaccaaacaaccgtgcggcctattgataaagagctaacacattgtcaaaaaacatcactatggttttttagagtttctcgatatcaattgcctgaatagcccttgcaatatcaggggaattattcaacacccgaacatgctgaaataattccgttgcttcatcgtattctttacgcaaataactcaaccactgtttaatccgcgcaacgtgatataacccggtatcgccctgcttttccagacgggtatatttttgcagcaaagcaaccacctccggccacggcattcgcggttcgttatattttaccacccggctcaggttgggaatattgagcgccccgcgaccaatcatcactgcgtcgcagccgctgatcgccatgcattgttgcgcgctctgccagtcccagatttcaccgttggcaatcaccggaatattcagccgctggcgaatatcgccaatcgcctgccagtcaatatgctccgcgcggtaaccctgctctttcgtccgcccatgcaccaccagctccgtagcgccagcctgttgaaccgcatcggcgatttcaaatttcttctcaccgctgtcccagcccagacgcactttcacgctgacgggcaaatgcgccggtacagcttcacgcatcgcttttgcaccctggtagatgagttcaggatctttgagtaacgtcgccccgccgccgctaccgttaaccgttttgctcgggcagccgcaattgagatccacgccccaggaacctaactccaccgcacgggcggcgttctctgccagccattgtgggaactgacctaacaactgcacgcgcaccagcgtaccagatggtgtccggctggcgttttgtagctcagggcaaatgcgatgaaagacttttaccggcagcagttgatccaccacgcggacaaactcggtgatgcacagatcgtagtcgttaacttcggtcagcaattcacgcaccagagagtcaagcactccctccatcggtgccagtaacacacgcatatcatcacccgcaaaaaaatgaggcgctatgttagcgcctatggtcagcggattaaaggtctgcaaagagggattgctgcaaactgcaatccctctctatgcttgatgtatgcctgagttcgctgcgcattgcgtaatgccggggagcgaaaaaataagcgctgatttcttaatgtgatcggtagcacgttttacgaattaattgtatgatgaatccatctcatctggggtgttgattatgagtaagacactgaacattatctggcaatatttacgcgctttcgtcctgatttatgcctgcctgtatgcaggcattttcattgcttccctgctaccggtaaccattccgggcagcatcatcgggatgctgatcctgtttgtcctgctggccttgcaaattcttccggcaaaatgggtcaatccggggtgctacgtactgattcgctatatggcgctattgtttgtgccgattagcgtaggcgtcatgcaatattttgatttgctccgcgcacagtttggcccggtagtggtttcctgtgcagtcagtacgctggtggtttttctggtggtgagctggagtagccaactggtacacggtgaacgtaaagtcgtaggtcagaaaggaagtgaagaatgatggcgaatatctggtggagtttaccgctgacattgattgtcttttttgccgcccgcaaactggcggcacggtataagtttcccttgcttaacccgttgctggtagcaatggtggtgatcattccttttttaatgctgactggcatctcttacgacagctactttaaaggtagcgaagtgctaaacgatctgctgcaaccggcggtcgtcgcgctggcctatcctttatatgagcagctacaccagatccgcgcgcgctggaaaagcatcatcaccatctgttttatcggcagcgtggttgcgatggtgacggggacttccgtggcattgttgatgggcgctagtccggaaatcgccgcgagtatcctgccgaaaagtgtcaccacgcctattgcaatggcggttggcggcagtattggcggtattccggcaatcagcgcagtttgcgtgattttcgtcggcatcctcggcgcggtatttggccatacattgcttaatgcgatgcgtattcgtaccaaagctgcgcgcggtctggcaatggggactgccagccacgccctcggtacggcgcgctgcgccgagctggattatcaggaaggtgcatttagtagcctagcgctggtgttatgcgggataattactagcctgatcgcaccgttccttttcccgattattctggcagtaatgggctaaaatttgcgatgcgtcgcgcatttttgatgtatgtttcacgcgttgcataattaatgagattcagatcacatataaagccacaacgggttcgtaaactgttatcccattacatgattatgaggcaacgccatgcatccacgttttcaaaccgcttttgcccaacttgcggataacttgcaatctgcactggaacctattctggcagacaagtacttccccgctttgttgaccggggagcaagtcagtagcctgaagagcgcaacggggctggacgaagacgcgctggcattcgcactacttccgctggcggcggcctgtgcgcgtacgccattgagcaattttaatgttggcgcaattgcgcgcggtgtgagcggaacctggtatttcggtgccaatatggaatttattggtgcgacaatgcagcaaaccgttcatgccgaacaaagcgcgatcagccacgcctggttgagtggtgaaaaagcgcttgcagccatcaccgttaactacacgccttgtggtcactgccgtcagtttatgaatgaactgaacagcggtctggatctgcgtattcatctgccgggccgcgaggcacacgcgctgcgtgactatctgccagatgcctttgggccgaaagatctggagattaaaacgctgctgatggacgaacaggatcacggctatgcgctgacgggtgatgcgctttctcaggcagcgattgcggcggcaaaccgtagccacatgccttacagtaagagcccaagcggtgtcgcgctggaatgtaaagacggtcgtattttcagtggcagctacgctgaaaacgccgcattcaacccgactctgccaccgttgcagggagcgttaattctgttgaatctcaagggttatgattacccggatatccagcgcgcggttctggcagaaaaagccgatgcgccgttgattcagtgggatgccacctccgcaacgctgaaagctctcggctgtcacagtatcgaccgagtgcttctcgcttaagcctggtgccggatgcggcgtgaacgccttgtccggcttgccagccctctcctggtgtcgaaattcccggcaaacagtttgccgtttcttgcgcaaaaccagcgggtaaagtagcctgatggaaattttccttagatcgagtctcctgcatgttaaagcgcgtgttcctcagcctgttagtcctgatcggcttgctgctgttgactgtgctcggcctcgatcgctggatgagctggaaaaccgcgccttatatctacgacgaattgcaggatctcccctaccgccaggtcggtgtggtgctcggaacagcaaaatattatcgtactggcgtaattaatcagtattatcgctaccgcattcaaggagcgattaatgcctataacagcggtaaggtaaattatctattactgagcggcgataacgcattgcaaagttataatgagccgatgaccatgcgcaaagatttaatcgctgctggtgtcgacccaagtgatattgttctcgattacgcaggctttcgtacgctggattccatcgtgcgtacacgcaaagttttcgatactaatgatttcattattatcacccaacgtttccactgtgagcgagcattatttattgcgctgcatatggggattcaggctcagtgttatgccgtaccgagtccgaaagatatgctgagtgtacgtattcgtgaatttgccgcccgtttcggtgcgctggctgacctttatatttttaaacgtgaaccgcgttttttagggccgctggtccctattccggctatgcaccaggtaccggaagatgcgcaggggtatcccgccgtcacacccgaacagttacttgaattacaaaagaaacaaggaaagtaattatggatgtacagcagttttttgtcgttgccgtttttttccttatcccgatattttgtttccgcgaagcatggaaaggctggcgcgcaggcgcgattgataaacgggttaaaaatgcaccggaaccggtgtatgtctggcgagcaaaaaatcccggactctttttcgcttatatggtggcatatatcggcttcggaattttatctatcggcatgattgtttatcttattttctatcgttaatattcccctctccagttaattattgagaataattattacttcacctgataagctgcggatatcacattcctaaccgcagctatttgtgaatcttttcacagtttaaattcccccgcacgcttagccttaatatcagtacattattatttactaaacgctcgccttaattacctatagcattaaggaagatcacatgccgcaacaaaattatctggatgaactcactccggcttttacgtctttactggcgattaaagaagcctctcgctgtttattatgtcacgacgctccctgtagtcaggcttgcccggcacagaccgatccggggaaatttattcgcagtatctactttcgtaattttaaaggcgctgccgagacaattcgcgaaaataatgccctcggtgccgtttgtgccagagtgtgcccgacggagaaattatgccaaagcggttgtacccgtgccggtgttgatgctcccattgatatcggccgcttacagcgttttgttactgattttgaacaacaaaccggaatggaaatttatcagcccggtactaaaacgctcggcaaagtcgcgattattggcgcaggtcctgccggattgcaggccagtgtgacactgacaaaccagggttatgacgtcacgatttatgagaaagaagcgcaccccggtggctggttgcgtaacggtattccgcaattccggttaccgcaaagtgtgctggatgcagagatcgcccgtattgaaaaaatgggcgtgaccattaagtgcaacaacgaagtcggtaacacactcacccttgagcagctgaaagcagaaaaccgcgcggtactggtcaccgtggggttaagtagcggttccgggctaccgctgtttgagcatagtgacgttgagattgccgtcgacttcttgcaacgtgcacgacaggcgcaaggcgatatcagcattccacaaagcgcattaattatcggcggcggtgatgtcgcgatggacgtagccagcacgctgaaagttctcggctgtcaggcggtaacttgcgtagcgcgtgaagagttagatgagtttccggcaagcgaaaaagagtttaccagcgcccgggagctgggcgttagcatcatcgatggattcacgccagtagccgtggaaggcaataaagtcacgtttaagcatgtacggttaagcggcgaactgacgatggcggcagataaaattattctcgccgtcggtcagcatgccagactagatgcctttgcggagttagagccgcagcgtaacaccatcaaaacacaaaattaccagacccgcgacccgcaagtctttgctgctggcgatattgttgagggtgacaaaaccgtggtctatgccgtgaaaaccgggaaagaagccgccgaggcgattcatcactatttagagggagcttgcagttgttaaattaatatttagagggagcttgctcatgttaacgaaagatcttagcattactttttgcggcgtgaagtttcccaacccgttctgcctctcttctagcccggtaggcaactgctatgagatgtgtgccaaagcctacgacacaggttggggcggtgtggtgtttaaaacgatcggcttttttatcgccaacgaagtcagcccgcgttttgatcatctggtgaaagaagataccggttttatcggcttcaaaaatatggagcagattgctgaacatccgttggaagagaatctggccgccctgcgtcggctgaaggaagattacccggacaaagtattgatcgctagcatcatgggggaaaatgagcagcaatgggaggagctggcgcgcctggtgcaagaagctggcgcggatatgatcgagtgtaacttctcctgtccgcaaatgacttctcatgcgatgggtagcgatgtcgggcaaagcccggagctggtagaaaaatattgtcgggcagtgaaacggggttccacgctgccaatgctggcgaagatgacgccgaatatcggtgatatgtgcgaagtggcgctggcggcgaagcgcggcggcgcagatggcattgcggcgattaacaccgttaaatccatcaccaatatcgatcttaatcagaaaatcggtatgccgatcgttaacggaaaaagcagtatttccggatattccggtaaagcggtaaaaccgatcgccctgcgcttcattcagcaaatgcgcacccatccagaactgcgcgatttcccaatcagcggtatcggcggcattgaaacctgggaggatgcggctgagtttttattgctcggcgcagcaacgttacaggtgaccaccggcatcatgcagtacgggtatcggatagtggaagatatggcaagcgggttgagccattatctcgccgatcagggatttgatagcctgcaggagatggtaggtctggcgaataacaatattgtcccggcggaagatttagaccgcagttatattgtctatccccgtatcaatcttgataaatgtgttggctgtggacgctgttatatttcctgttacgacggcggtcaccaggcgatggaatggagcgagaaaacccgcacaccgcattgtaataccgagaaatgtgtgggttgtctgctttgtggtcacgtctgcccggtgggttgtattgagctcggggaagtgaagtttaagaaaggcgagaaagaacacccggtaacgttgtaaaaccagagacgcatccggcatttggttcctgtcgccggatgcggcttgaacgccttatccggcctacaaaaccatacaaatcagtatgttgagcttattgtaggccggataaaacgcgccagcgttgcatccggcatttggctcctgttgccggatgcggcgtgaacgccttatccggcctacaaaaccacacagatcatgatgttatgtgcgtttatgaccgaatgcggaccacattcacatcatttcttacgcgcgtatttcagactatccagcgctacggcgaagataataatcgcccctttgatgatgtactgccagtatgggtttacgccgatatacgtcaggccatagttgatgacggtaaaaataattaccccggtcaccacgccaatcaccgtccccacaccgccgctgaagcttacaccgcctaccacgcacgccgcgatagcatccagctcatacataaagccgaggttgttggtggcagagccgatacgtccggcttctaacatcccgccaaaggcatagaacacgccagacaacgcgtagatcatcagcaggttcaggccgacgttgacaccagatacttttgccgcttccgggttaccgccaatggcaaaaatgttcttaccgaagcgggttttgttccacaacacccagacgaacgccaccgcaatcaacgcgtagaaggtgatgtaagagagacggaaactccccagcgcgacaaagccctgagcaaaggtagagaagccactgtcaaaaccagaaattgggctcgccccgacaaagtcgtaatagaggctgttgatgccatagacgatgatcatcgtgccgagcgtggtaatgaacggcgtcacgttgagataagcgataatcagaccgttgatcaaaccgatcaccgcaccaatggcacagacaatcagaataaccagcgcaatcggcatcgtcgccatttccgggaacactttgttggcgttatccatggactgcaataatgtcgcagccaccactgccgccagccctacctgacgaccagcagaaagatcggtcccctgggtgacaattaaccctgccacaccgagcgcgataataatacgcacgctactctgggtgagaatattacttaagttcaacagacttaaaaatgttgggtcctggaaaataataatcgccagcaaaactaaaagaacgacgtaaataccgccctctttcaggtaagtaagaaaacttttcttatttaacgcactcatgggaagcccctaatcttaaaggtgcaaagacgcaagacgcagaatttcgttttgcgttgttgtttttgtatcgacaattccggaaacgagaccattgctcatgaccagaatacggtctgttatccctaacaactcaggcatttcagaggagataataataatccccttgcctttcttcgccagttcggcaattaactgataaatttcaaacttcgccccgacatcaataccgcgcgtcggttcatcgagcattaatatttctggttgcgttagtagccagcgaccaataatcaccttttgctgattaccaccggagaggctaccaatttgcgtccgatgacccggcgtttttacccgcatgctatcaatcacccactgggtatcgcttttcatccggctgttatccagtaaaccaactttatttttgtagttgcgaatattggaaattaagctgttaaaaccaatatccagataggcataaattcccgtactgcggcgctcctcagttaccagtgcaaatccatggtttatggcttcgttggcattatggttattgatctgtttgccgtgcaacgttatggtgccagcgcttttctcgcgaataccaaataacgtctcaacaatatcggtacgtttcgcccccaccagaccggcaataccgaggatctcccctttatgcagatcaaagctgacatcgcgaatgctcggctggcgcagactcgtcaggttacgtacctcgaggatgacttcgcccggtttgttttctttgtcagggaaacgctggttaagagaacgcccaaccatcatggcgatgatcttgtccatcgtcagtcctgccagcggttcggtggcgatccactgaccgtcgcgcaatacggtaacttcatcacataactggaagatttcttccattttatggctgatataaacaataccgcagccgcgctcttttaatttacgaataatagtgaacagatgattgacctctttttcggttaagctagaagtcggttcatccataatcacaattttcgcgttataggaaaacgctttggcgatttcgatcatctgcatttggctaacggataatgtgccgacgcgcgcacgcggatcgatatcaatatccagttcgtcaaaaatcgctttggtttcgcggtacattttgtcctgatcgacaaacatgcctttggtgggatatcgccccagccacatgttatccatcacgctacgttgtaataccaggtttaactcctggtgtaccatgctaataccattttccagggcttcttttgcagaatggaaatcgatctctttaccctggaataaaatggtgccggagtctttttgataaataccaaacaggcattttaataatgtgctttttcctgcaccgttttcccccattaatgcatggatagaatgtggccggacttttaaattaacgttatcaagtgccttaacaccaggaaaggacttgttgataccgctcatttccaacaagtattccccggaggacggagtcgtactgctgaccatataattttaccttgttggccatacaataagggcgcagtaatagactgcgcccaatcagtcttatttcttgctgaattcagccaggttgtctttatctacgccaacataaggtacgcggaccactttgttgtcgattttccagttggtgccatcagccgcacctttaccatcggccaggtttttcgccagatcaaaggtcgctttcgcctggttgttagcatcgttcagtacggtgcccgccagtgcaccggatttcaccagcgccagcgcttctggcagcgcatcgacgccaaacaccggaatgctggacttgttgtgtgctttcagcgcttcaaccgcgcccattgccatcgcatcgttgttggcgataaccacttcgattttgttggcgttcgggccagacagccaggcgtccatcttatctttcgcctgagcggtgtcccacattgcggtatctaactgtaactgttcagttttgatgcctttatcgttcaattctttaatcacgtaagtggtacgtgcttctgcatccggatggcccggttcacctttcagcagtacgaactgaatctgaccgtctttgttcagatcccaaccctgattcgccgcccagtgtttagcaatcaaatcgccttgaataatgccggactctttggagtcagtgccaacgtagtaggctttgtcgtagctatccagcgccttacgagacggttctttgttgaagaaaaccaccggcacgttttgcccacgcgctttctcaatcaccgtacccgcagctgccgggtcaaccaggttgattgccagtgccttcacccctttcgccagcaatacgtcgatctgatcgttctgcttggactggtcattctgagaatcattcatcagcagctgaacatctggcgcggctttcgcatcttgctcaatagccttgcgcactacagacataaagttatcgtcgtacttatagattgttacaccaatgcgagtatcagcagcgtgtgcagcggcaccgaataacatgctggccatcacagcagacagggttaacaccttcttattcatggtatctccggtttttcttatgcagggtagtgcttgagataaatgctcggcggggcagtagagttaatgaagtgttactgaacgccgaagctcactttttaaaattcgttcttccatgcccggtaacgctccagaaaacggctttaattgttgttatgacgctgttacctcggcaaaagtgattattcactgttacatacgggttacaacgttaaaacggtgcaatcatagctatcacattgttaagatactgtgaaatcactcacagattgaaagcggttacatcgcctgatttgtactgttagtgatcgccgccgcattctggcgtgttgcgacagaatggcgacgcactaacgtcggcataaaacagtggctggcacgaggatcaatattgcctgctgccccctgcaaggccagttcggtggctaatttcgccatactagcaatgggataacgcacggtcgttaattgcgggtcggtgtaacgggcgatgggaatatcatcgaaaccgatgatactgagatgtaacggaatcgcaatgccattatcttttaatgctgtcagtgcgccagcggccatattgtcgttataagcaaatacagcggtaagttgtagattgcgccccagcagttcaaccatcgccgcctcaccgcccggcatgtccggcgtaccagcgccaatccagctttccggcggaataatatcctgctctttcaacgcactcatccagcctgctttacgcatggcgtcatcttcaatgccgtggctggaagaaagataaccaatacgttgatgaccgttattcagcaacatgcgcgtcgccattcgggcaccgctgagattatccaggcaaacgcaacgatgggcgtaccccggcacaacgcggttgattaacaccataccgggaatgttatccataaattgcgccagttcatcgtcactcaatgctttactgtgaacaatcaacgcattacaacgctggcgaattaacacctcaatggcgtgacgctctttttccgcttcatgatagctattgccgattagcacgtatttctgatgctgctgagcgaccagatccaccgcttttaccagcgcgccgaaaaacgcatcagaaacgtccatcaccaccacgccaatggtgtcgctaacctgagttgccagcgcctgggcattggcgtttggccgataatccagctcactcacggctttcattactgcttcacgcgtgtcggcactgaccagcgtgctgttattgagcacccgggaaaccgttgccacagagacgccagcctgacgcgctacatcacgaatggtgatcatattcactacctgttatgagattgcagtaaatgactgcttgctggcggctattttgtcagcactgaatacaggacttcgtgaatcgagtcacagcaatggaaacggttacagccgttttgttaacgaatgtgatccagatcgttatctacttgttttagatattgccggtccggcagcacgcaaagttaactgacgccagagccattccaccggcccctggcggaagtaacgcagccagataacagagaagaggatattcgccagccataccggaataacaaacgccagcagctccaggcggtcaaaatgcataaacaaaccgaggtggtaaaaaagcgtggtacaaatcagcgtttgcaatagatagttggtcagcgccatccgtccgacgcaggcgatcgcaagcaccagcttaaagcggctcaattgcggccagaagccataaaacaggctcgcatagccaatcgcctgaaacggcgcactcagttcccgcggcatttgaagtaagaaggcacaccagcgatacgcccagtccagctgccattgcagggcgatggcaggaaggttaatggtcaccccaatcgccaccagcacaaaaccagtacgacgatagtgacgtaagctgaactgccctttcagccagccgctgcgcatcagcgccgcaccaatgagcatcatccctgccagttgccagccatactgtgcgcccagtgccagtaaactgttgccaacaccatcggcacgattactgatcgcttcaacgccgccgtgaagcttccagtatttttcatacaaaatagcgcttgcatccggcgtccaggcgcggctggtctggctgtcggaaatcagccccaataacagcaaaacgccaagccccaccagataaagcatgacgcctgtattaaacaggctttttacgcttggcgcatcgcgcaccagccgccagcagattaagcccaccagcccgtaagccagcaaaatatcgccgtcccagaacaataaaccgtgaataaagcccaacaagactaacagcgttaaccggctctggatccagcgtctgccacggggcagcaacatttgcaggcccgcaccaaacagtagcgcaaaaagcgtgaggaatttcacctggccgatgagatcaagaaatgcccaagtccatgcatcccgcggcgtaatagcaccgtaccaggcgggattgagataagccgcctttggtagcccaaaggcgctgatgtttaatagcaggatccccagaatggcgacgccgcgaacaaaatcgagcgtgacgttgcgctccatggttcctgccttttaatcagttgtgatgacgcacagcgcgcagaaactcgtggcgcgtattctgactggatttgaacaatccaccaagagaggtcgttgtcgtggcactggttgcatcgcggatgccacgcgccttcacgcagtaatgcaccgcgtcgatgctgacagccacgttattggtgcccagcagcgtttgtagcgcaataagaatttgctgcgtcagacgttcctgcacctgcggacgctgggcaaagaactgcacaatgcggttaattttactcagaccgatcacgctatctttcgggatataggccaccgtcgctttgccatcgatggtaacaaaatggtgttcacaggtgctggtcagagtgatatcgcgcacggtgaccatttcatcgaccttcattttgttttcaatgagggtgattttcgggaaattggcgtaatccagaccggagaaaatttcatcgacatacattttagcgatgcgatgcggcgtttccatcaaactgtcatcagccaggtcgagattcagcagctgcatgatttcggtcatatgaccagcaataaggcttttgcgcgtttcgttatccatttcatgcacgggcgggcgcagcggtgtttccagtcctcgcgcaactaacgcttcatgaaccagggccgcttctttactgagacttggcatttatgatttctcctgcaggtgtgacgcctccgccctgcgtgggggcaaagttattaagctgatttacagcctgattattgtgcgtgaggcggcgcacataatccagtattcacagcgataattattgtaattgccgctgcctttcatcagcagatgttaaaacatcgttatgcaaatacggaagtgaaagttactcacagcacattgaataaacggtatgatgaagaaattgcaaacaacacaacaaggagccacgcatggaaatgctcgaagagcaccgctgttttgaaggctggcagcaacgctggcgacacgactccagtaccttaaactgcccgatgacgttcagtatctttctccctccacctcgtgatcacactccgccaccagtgctgtactggctttccggattaacctgcaatgacgagaacttcaccaccaaggcgggtgcccagcgggtagcggcggaactggggattgtactggtgatgccagacaccagcccgcgcggcgaaaaggttgccaacgacgatggctacgatttaggccagggcgcaggcttttatcttaatgccacgcaaccgccgtgggcgacgcattaccggatgtatgattatctgcgcgatgaattaccggcgctggttcagagccaatttaatgtcagcgaccgctgcgccattagcggtcacagtatgggtggtcacggtgcgctgattatggcgctgaaaaatccgggtaaatacaccagcgttagcgcctttgcgccaattgtgaatccgtgcagcgtcccgtggggaatcaaagcgtttagcagctatttaggtgaggacaaaaatgcatggctggaatgggacagttgcgcactgatgtatgccagtaacgcgcaggatgcgatcccgacgcttatcgatcagggcgataatgatcagtttcttgccgaccagttgcaacctgcggtactggcagaagccgcgcgccagaaagcgtggccgatgacgctgcgtattcagccgggatatgatcacagttactacttcatcgcctcttttatagaggatcacctgcgcttccatgcgcagtatttactgaagtgaaagtccgcccggttcgccgggcatcttctcatcagaagcgataatccactgccataaagtaacgacgtccgtcttcgttatagctgtagtcgtcacgactgagatccttgtcgccaaggttcagcacgcctgcgcgcagtttgacgtctttagtcacctgccaggccgcgccggtattccagatggtataaccgcccggtgttttagccgtcgcgctgtcggcgcgtttctgcccggtatagtgcccagaaacatagaaactccagtcttccagcgccagcggtttccagtccagcgtaccgttagcagtatggaacggcagatcggatagcggtttgttttcgccgttgctgacatcacgaccatcgttgtaggtgtagttgatgctcagtttccattcatcgttgaacggaattttcagttcggtttccacgccctgaatacgagctttgttaacgttgtagtagctaaataccggtatgcgccgtccgttagcgcccgtctcaaaaccaacaaagttttggtagcccggtgcagcgttgacgtcagacgtacggctgatgctgatacgatctttcacatcgttacggaaaacggtaacgctggattcaaccccttccagccagccttcttcacccatgtagtaaagccccagctcccaactttcgctggtttctggtttcagatccgggctacccacaatcttacatgcgccacggcaggaattgctcgtccagtcagggctaagttgcaacagagaaggtgctttaaatgccgtcgcccagccccctttcaccgttacggtgtcggtggcgttataaaccaggtaggcacgcggactccagtgttcaccgtaggtttcgtgatcgtccatacgcacgccggtcgtcagcgccagcggctcgaagatccgccattcatcttccacaaacagcgcgtactggctggcagacgttttggagctggttcccccggtcaggttcaccgcatcgctaagtttgtcgtgacgccattcaccgccaaccgtgagaaactgattaatcgccgtcagcggcaacgtgtatttgccgtcgaccgtattgctttcggaagttatcgggctgctgttgccagggtttttgttctcgactttctcaccgtagtatttcagttcgctggtgccgtaatcccaacgcccattatggctgacggagtagttctggcgttccaggcggtttttgtccaggctgtcggaatcacgatcctgacggtcgaaaccgtatccggcagtaaaatcgtgattttgattcggtgtccaggcaaattcgacattgccgtcgcggctggagaatccttcaatacgcggcgtttctccggtatcggtggtcgtactgttttgcgggtcatccttttcacgttttgccaggctgccgtaagctttcattcccagcacaccatcaattaatggtccactggtaaagaactgaccgttataggtgtcaccgcgatcgcgatgttcctgaatggtggtatcgacggtaacggtaccgctccatttctgaccgatttttttggtgatgatattcactacaccgccgagcgcatcggaaccgtacaggctgctcatcgggccacggaccacttcaatacgttcgatggaatcgaccgggatccagttcagatcgaaatcattgtggcggaagacggcattgcgggagttcacgcgtttaccgtcgacgagaatcagggtatagctgctgtccagaccacgaatactaacgcccttacggttatccccttcgttcgtcagttgtacgccaggcacttctttgaggacatccttcagattctgtaccggttttcgctgcaggtcttcctgggtaatgacgctgatactggcaggtgcatctttaagattttgttccacggaagatgcagtgacaaccatcgtttcgccatcatcatcgaccgctaacacaggccatgcacaagaaatagcggacaaacacagcccgacccgtacgaaagggttcaacctaaacattccatatctccatgaggtaactacgaaaataaaatgggttatcgctcacatcttcttcacgtccccttgcgtacggcagcatcgcggtggacttattttttatgcaggtgatcatcccagaaagccggaacagcctctgatttgtcagccttttttgattgcggcgtaacgataatgcaaacgataacaattatcaatccaaatgttaaattttatatccgcatgatttgtcagggaaatggaattgaaaaagccctctcggttgagagggcttagcaaggaagggaggaaacttatttcttatcgttctgcgggaacttcatttcgctgtagcgtacgaagtgagttcctttaatcagcttgtagccgaaccaaataatcaggaacagcgggataccaatatacgttgccgctacgccgccccagtcaatagtatctttcaggaacgcttcgtagttctggcccaaagtgataatcagacacagaatgaatgcgaagatcggccccagtgggaagaaaccactacggtacggcagatcgttaatgtcgtgtccctgcaatacgtaaccgcgacggaagcgatagtggctaatggcaatccccagccaggcgataaaacccgtcatcccggaggtgttcagcagccacaggtataccgtctggttgccaaacatggaggtcaggaagcacagaccggcaatcaccgtcgtcgcatacagcgcattacgcggcacgccaccacggctcagtttagcgaaaatgcgcggcgctttaccgtcacacgccagggtgtacagcatacgagtagacgcatacataccggagttacccgcactcagcaccgccgtcagaataactgcgttcatcaccgccgccgcagagagcagacccgcgtgctggaacaccagggtgaacggactaacgctgatgtctttaacatcgttacgcagcaggctcggatcggtgtacggaataatcaggctgataatcaggatcgcgaacacatagaacaacaggattcgccagaacacctgacgtaccgcgcgtggaatgtttttcgccggatcttcggactcgcctgcagcaataccgatcagctcggttccctggaaagagaagccgacaatcatagctacgccgatcatcgccgcaaaaccaccagcaaacggcgcttcgccgattgtccagttgctccagcccgcaggctgcgcgcctttgaagataccgataatcatcagcacgccaacgatgataaagacaataactgtcgtgactttgatcagactgaaccagtattccgcttcaccaaagccacgaacactgatgtagttcagcaggaagataacgccgaggaacaacgcactccagatccagcccggtgtatccgggaaccaccagctcatgaccagctgagctgcaaccaggtcaacggcgatagtcaccgcccagttgtaccagtagttccagcccagcgcgaagccaaagccttcttcaacatagttctgaccgtaagtggcaaagctaccggaaaccggcatatatgcagccagttcaccgagactggtcatcaggaagtaaaccatcaggccaatcagcatatagctgagcaatgccccgcccggacctgcctgagaaatcgttgcgccagaggcaacaaaaagacctgtaccgatggaaccgccaatggcaatcatcgtcaggtgacgcgcctttaattcacggcgtaagcccggcgcttctgtggttttagtttcggaaaccatacaaaaatgctatccatcttaaaaatgaggcgcgattgtagcagacgattggcaatccttccggcagaaatacacggttataagacaccttcatgatcgcccagggattataagtaaagcagccaatctcttttctggcgaatgcatgctgaaggcgctgcgtcacgaaatcgacacagcaccagcatgttcttgtacagcaacttaacgcggcacatttgcgggatcgcaatagtccagaaagcgccgtagcgcgttggaaaggtgtttttgccgatgatgtatacgccacaacgtacgcatcaggcgcggcagagggaccgcaacttcacttaatgtgcctgcctgcaattgatcttcaatcacacgtcggctcaggcaactaattcccaacccatgacgcaccgcatgtttgattgcctcggagttacctaattccatcgccatctcaaacttcggtaaatgactcagcaacagataatcgacaatctcccgcgtgccggaaccgcgttcacgcaggatccacggcgcagcggccagctgttctaaggtgaccggaccacgggccaacgggctagtcggcgcggcgaaaaccaccagctcgtcttccagccacggttcagaaatgatttcagtgctgtggcacggtccttcaataaagccaatatcaacgcggaaatccagcaccgcttgcatcacgtcctggctattcccaacgctaagttcaatcggcaactgcggataatcatggcgataacgggcgataactgcaggcagaatgtagttaccgatggtactactggcatagatacgaatcgcgccgttgtcttcgcgaaacagttgttcgatttcaaccgcctgttcaagcaatgccaacgcacgcggatagagcagccgcccgtgttcattaacaaccagtcttttccccacgcgatcaaacagttgcacgccaagctgcccttccaggtcggtcaaggctgcgctcactgcactttggctcaacgccagcatcacgctcgcctgggtggtacttccacttttcaatacttctgcaaaaacttccaactgccggagggtgatgtgcatagtcgcttaccacttataaagattaattataaatatataatcaattttatttttaaaccagttagtcgtaaccttatgcccggttaaaggagagggttatgacgaatatcaccttacagaaacaacatcgtacactgtggcattttattccggggttagccctgagtgcagttatcaccggggtcgccctgtggggtggttccattcccgcggttgcgggtgccgggtttagtgccctcaccctcgcaatcttgttggggatggttttaggcaacaccatctatccgcacatctggaaaagctgtgacggtggtgtgctgtttgccaagcaatatttattacgtctgggtatcattctttatggcttccgtctgacgttcagccaaattgccgatgtcggtatcagtgggatcatcattgacgtgttgacgctgtccagtaccttcctgctggcttgcttcctggggcagaaagtgtttggtctggataagcacaccagctggttgatcggtgccggtagcagtatctgtggtgctgccgcggtactggcgactgagccggtagtgaaagcggaagccagtaaagtaaccgtggctgttgcaaccgttgttatcttcgggaccgtcgcgattttcctctacccggcgatatatccgctgatgtctcaatggtttagtccggaaactttcggtatctacattggttctactgtgcacgaagtggcgcaggtggtggcggcaggtcatgccatcagcccggatgcggaaaacgcagcagttatttccaaaatgctgcgcgtgatgatgctggctccgttcctcatcctgctggcggcgcgtgttaaacagctgtctggggcgaacagcggcgagaaaagcaaaatcactattccgtggtttgccatcttgttcatcgtagttgccatctttaacagcttccacctgttaccgcagagcgtggtgaacatgctggtaacgctggataccttcctgctggcaatggcgatggcggcgctgggtctgaccactcacgtcagcgcgctgaaaaaagctggggcgaaacctctgctgatggcactggtactgtttgcctggctgattgttggtggtggtgcgattaactatgtgattcaaagcgtcatcgcataaaccactacatcttgctcctgttaacccgctatcattaccgttttcctccagcgggtttaacaggagtcctcgcatgaaatacattggagcgcacgttagtgctgctggcggtctggcaaatgccgcaattcgcgccgccgaaatcgacgcaaccgcgtttgccttgttcaccaaaaaccaacgtcagtggcgtgccgcaccgctcacgacgcaaaccatcgatgaattcaaagccgcctgtgaaaaatatcactacacaagcgcgcaaattcttccccacgacagttatctgattaacctcggacatccggtcactgaagctctggaaaaaagccgcgatgcctttatagatgaaatgcagcgttgcgaacagctggggctttctttgctcaacttccaccctggcagccatctgatgcagattagtgaagaggattgccttgcgcgtattgccgaatccatcaacattgcgctggataaaactcaaggtgtgacagcggtgatagaaaacaccgccggtcagggcagtaacttagggtttaaattcgaacatctcgcggcgattatcgacggcgtggaagataaatcccgcgtcggcgtctgcattgatacctgccatgctttcgctgccgggtatgatttgcgtactccagccgaatgcgagaaaacattcgcggattttgcccgtactgtcggctttaagtatctgcgcgggatgcaccttaacgatgcgaaaagcacctttggcagccgcgttgaccgccatcatagcctcggtgaaggcaatatcggtcatgatgcgttccgctggatcatgcaggacgaccgtttcgacggcattccgctgatcctcgaaaccatcaacccggatatctgggcagaagagatcgcctggctgaaagcgcaacaaactgaaaaagcggtagcctgaagatgaataaccgggaaaaggagatccttgcaattttacggcgtaacccgctgattcagcagaacgaaattgcggacatgctgcaaatcagccgtagccgcgttgcggcgcatattatggatttaatgcgcaaaggccggattaaaggcaaaggttacattctcaccgagcaggaatactgcgtagtggtggggacaatcaatatggatattcgcgggatggcggatatccgttacccgcaaagcgcttctcatcccggtacaattcattgcagtgcgggcggcgtgggacgcaacatcgcccacaatctggcgctgttaggccgtgacgtccatttgcttagtgtgattggcgatgacttttatggcgaaatgctcctggaagaaacgcgccgtgccggcgtgaatgtctccggctgcgttcgtttgcatggtcaaagcacaagcacgtatctggcaattgccaatcgagacgatcaaaccgtgctggcgattaacgatacccatctgctggaacagttgacaccgcaactactgaacgggagccgcgatttacttcgtcatgcgggcgtggtactggctgattgcaacctgacagccgaggcgctggaatgggtctttaccctcgctgatgaaatcccggtgtttgtcgataccgttagtgaattcaaagcgggcaaaatcaaacactggctggcgcatattcacaccctgaaacccactttaccggagctggaaattttatggggacaggcgatcaccagcgatgctgaccgtaataccgcagtgaatgcattgcatcagcaaggtgttcagcaactgtttgtttatttgcccgatgagagtgtttattgcagcgaaaaggatggagaacaatttttgctgaccgcgccagcgcatacgacagtagacagttttggtgctgacgatggttttatggcgggcctggtatatagctttcttgaaggatacagtttccgcgacagcgcccgttttgcggtagcctgcgcggcaattagccgcgccagcggcagcttaaacaaccctaccctgtctgccgataacgcgcttagtttagtgccaatggtgtaacaatgttgccggatgcgacgcttaacgcgtcttatccggcctacaaatcaggcaatttcagcaagtaaatgtaggcctgataagcttgcgcatcaggcaatgacactcaagctaaaccaataaagaacccggcaatggtcgcactcatcaagttggaaagcgtcgccgccgccagcgcccgtaaaccaagctgggcgatttccggcgcacggtgtggcgcaaccgcagaaaacgcccccaccaccaccccgatagaaccaaagttagcgaaaccgcacaacgcgaaggaaataatcgccacagttttagcatcgagagtgccagccgtttgcagatagggactgaaattgagataagcgacaaattcatttattgccagtttctgtccaatcaaactcccggcaagattcgcatcactccagtccacacccatcacccacgccagtggagccagcaggtaacctaaaatggactccaggctggcatgttcaaaaccaaaccagccaccaacgccgccgataataccgttaatcaacgcaattattgcaacaaatgccatcaccactgttgccacacctgcggcgattttcagcccggtcattgcccctgtcgcagcggcttcaataatgctttttggcggtgtttcggtgaaagagaggttattaaaggaaacctggctagattccgttgccgggcttaacaggcgggcaaacaagatcccgccagggatcgccattaaacttgccgccagcagatattccacaggcacgcccagtgcggcgtaaccaatcattgtgctaccagcaatgctggccatgccactacaaatcgctgtaaataattcattgcgattcagacgatcgataaagggtttgacgattgccggaatttcgttttgcccgaggaaaatggtggtgaccgcgacgaaactctcgatcttgctgatatttaatgctttctggaagataccgccgagaattcgaattaaaatccccatcacaccgatgtagtagagaatactcaccagcgcggtgacgaagataattgccggtaacaccctgaaaccaaagataaatcctgcaccatcaaataaggtatccattttcggtccgaccagagaaccgaagataaatgcgctacccgcgtcgctgtacgccatcactttatgcacgccaaaagcgactttttcagcgacccaacgccctggcggtaaccaaagcataatgccgccaatcacgacctgtaacactaacgccgcgccaacggtacgcaggctgatcttcttcttgtttacactcagtaaaaacgcaatcgtcagcaataccaccattcccagaacacttctcatgacatccatagtgattatctcttcatgtcatattgggcgacggctttctgcccatcagaaatagccaggcctgcatcttgcgataccggcccggcttgttatcaacacttaatgggttttgatgtagccgcgcacgcactcttcgactaatccccagaaccagtctgtatcaatagtgatgccgactttggtattggcgggcttgccaagaacgcccagctcgtcgcagacggtacgcccatagcaagggccactgttgacgtccacttcgacgtacatctcctgggttttaatgccatcagggttaatcagataaccgatgcaggtggcgtcgtgcaccgggccgccagcaaggccgtagttttcgaactgcgttttgagagtgaagttcatgatgtcgctgaacagctctccggcggggccgcctgccctttccatccgagcaatcacgtccggggtgcaaacggtctggttggtgagatcgaggcccatcatcactaatggaacgccggaggtgaacactacgcgtgcggcttccgggtcggcaaagatgttgaactcggcagatggcgtgaagttgcctgtaccgtaagcgccgcccattagcacaatttcacggattttgggcaggatcgcgggttgcatacgcattgccaccgcgatattactaagcggaccaaccggcaccagagtgatatcgccatcgcttgccatcagggtatcaatgatatatttcaccgcatgagtgctttctgcctggcgggtcagcggctcgaataccgggccatccagtccggtttcaccgtgaatattatcggcaacgatttgttgacgcataatgggctgcggcatccccgcataaaccggaacattaatctccagtttctggcaaacattcaggccattaattaatgttttatcaagcgtctgattacccgctacaatagtgatgcctaataaatctattgccggatgtttcgccgccatcattatagcaatagcatcatcatgacccggatcacaatccagaataatttttctcttttccattgtttatttcctctgtttccagttgcgttattttttctacagcaaagaaaattcgaccgggccgatgattgaatcttaacaacagcgtacgtatgctaaatatgagaaatctcatagcggataaacatcgtgaaagaaatccacaataatgatcttaagcagcaattgatgagtgaatccgcgtttaaggattgctttttaacggatgttagtgccgatacgcggctgtttcattttttagcgcgtgactacattgtgcaggaagggcaacagccgtcctggctgttttacctgacgcgaggccgcgccaggctttacgccacgctagctaatggtcgcgtgagcctgatcgatttctttgccgccccctgttttattggcgagattgagttaatcgataaagaccatgaaccgcgtgcggtgcaggctattgaagagtgttggtgccttgcgctccctatgaaacattaccgtccgctgttattaaacgacacgctatttttacgaaaactctgcgtcaccttaagtcataaaaattatcgtaatattgtttctttaactcagaatcaaagttttccgttagtgaatcgcctggcagcatttatattactcagccaggaaggtgatctttatcacgaaaagcatacgcaagcggcagagtatttaggcgtttcttatcgacatcttttatatgttctcgcgcagttcattcacgacggtttattaattaaaagcaagaaagggtatctcattaaaaacagaaagcagttgagtggactggcgctggagatggacccggagaataaattctccgggatgatgcagtaaaaattattttcaatagcgcgattgccggatgcaacgcttaatacgttttatccggtctacaaatcgagcattacgccagaccaataaagaacccggcaatagtcgcactcatcaggttggaaagcgttgctgctgccagcgcccgtaaaccaagctgggcgatttccggcgcgcgttttgggctaatagcgctaaatgcgccaacgacaacaccgatagaaccaaagttagcaaaaccacaaagcgcaaaggagataatcgcaatggttttcacttccagcgtgccgcccgtttgcaggtatggggagaaactcaggtaagcgacgaattcgttaatcgccagtttctgcccaatcaggctacccgcaagattggcatcactccagtccacacccatgatccacgccagcggtgccagcacatagccaaaaatactttccagagaggcattggcgaaaccaaaccagccgccaattccgccgataatgccgttgatcagcgcaataattgcgacaaacgccattaccaccgtcgccacaccagcggcgatttttagcccggtcatcgcaccgctcgccgccgcttcgataaagctttttggcggcgtttcgctgaagctcagattttcaaatgtgacctggctaggctcggttgccgggctaagaatacgtgcaaacaaaatcccgccagggatcgccatcaggcttgccgctaacaggtagtcaattggtacgcccattccggcataaccaatcatcatgctaccagcaatggacgccatcccgctacaaattgcggtaaacaactcgttgcgattcatgcgatcgataaacggtttaacgatcgccgggatctcattttgcccgaggaaaatagtagtaaccgcaacaaaagattcgattttgctgatgttgagggctttctggaaaatgctgccaaggatgcgaatcagcagccccatcacgccaatgtagtacagcagactgatgagcgcagtaacgaaaataatcgccggaagtacgcgaaaggcgaagataaaacccgcaccgtcaaacaggacatccattttcggcccaaccaggctaccaaaaatgaaggcgctaccggcatcactgtaagacatcactttatgaacgcctaatgccgcctgttctactgcccattttcccggtgggaagtagagcatgatgccaccaatagcgatttgcagcagcagtgcggctccaaccgtgcgcaaactgatgctctttttattcacactcaacagaaatgctattgccagtaacaccaccatccccacaacacttctcattatatccataatgattttcccttcatgccggtaaacccggcgtcagcgccaggttttggtatgcttgatgagtacgggcgacggctttctgcccgtcagaaattaacccgcgagacgctgatattctttggcaatttcgctcgccagaatggcgttgttgaacaccagctggatgttggatttcaggctgtcaccgccggtcagttcagcaacgcgcgccagcaggaatggcgtactttctttaccaatgactccctgagcttcagcttcagctaccgcctgatcgatcgccgcattgatagtgtgttccggcatagcaaactgttccgggatcgggttcgctaccacgaggccaccgttcagaccgctttgccatttcaccaccattgcacgggcaatttcgctggcgctgtcgagacgaatgctgacgtcaaacgggctggtgcggcagaaaaacgcaggcagcgctttagtctgatagccaattaacggcacaccgaaggtttctaaatactcagtggttaatcctaaatcgagaatagatttcgccccggcacaaacaacggtgacattagtatttgccagttcttgcaaatcggcagaaatatcgaaggtatgttccgccccgcgatgcacaccaccaattcccccggtggcaaatactttaattccggcaagcgccgcaataatcatcgtactagccacagtggttgcgccattttttccggcggcaacaacaaaaggtaaatcgcgacgactaactttggtcacgttatgcccttcacgacccagtaattcaatttcttctttgcttaaccccactttcatcacgccgccaataatggcgatcgtggcaggtacagcgccctgtttacgaatagtttcttcaacttcaattgcggtctgggcattttgtgggaacggcatcccgtgagaaataatggtgctttccagcgccacaaccggttttttgttttttaaagcgtcctgcacttccggggaaatttgtaataattcaggggaaatttttaattcagacattctgcgttctccactaagcttataacgttggcaatgcttaaatcggggttattggtgtattcacaggagagcgccatactgctacatccctgtgcgaaacgaacagattcggcaaacggcattccgtctacccaacagctagcaagtcccgccatcatggcatcgcccgctccggtaacattaataacattggttttgatcggcgcagaccagccactttcaccgctgatatcgctgtaataaacgccgtcgccgcccatgctcaataccagtcggttcaggccatgttgatggaaccaggcagcaacttttgccacatcttcacgcccactcagcgcaatcccactcagggtttccgcttcaaggcggtttggcttgagagtgtggatctgatttagacggtcgcgcactttgacacatttccatgcgctaaccggatcgacaaatacgggtacgttggcggcattatccagaatccatgccagtgcctcttcactgatattacagtccgcgacaatgacctttgccctctgaataaattcaccgtgctgtgcgagatattcagctgtaatagcgttgctaatattcatgtcatttatagcaaccagcatttcaccggtattatcgagtaaacttaaataactgctcgtattttctcccggcacaatcaggcatttatcgacataaacgccagattgattggtttgcgttagcaggctttgaccataaaaatcactgcctacggcgctcagtagccaggctttgttacccagcaacgccaggttttgtgcaatattgcgccctactccaccaggcgtaaattttattttacctggattactatccgcataatttaaactttcatgactatatccggcgacatcaatattcgcgctacctataattacgacataatccttttcgcgcatagcacgtcctctggtaaaaaattaccaaccctgtcaatccacaagaatatagatactgcaaagacggtttaaacatgtgttcatatttaaacatgtgctcatagtatgcatgttttacgtaaagtaaattaccgccagagaggcaaaatgggcagatttgagcaggctcacaaaatgcgattaaatgcctgaattacaaaagcgaggaatttgtgacgggatgcacagaacagaacaataaaaaagggcagaaaataatctgcccttgaggaaataacctgagtgtttgatgaacgtttgaagtttctactgaaagataaaaccatttaaattcataaaattacattcacaaaccggtcattctctttgcgctcatcaaatgttacaggacaggaaatttctgccctgtaacacaccttttattacgctgctttcgctactgcgtccacttccggacgtttcaggaaggcataggccaaacccgccaccagcgtaccggcaataattgctaccaggtaacccaataccggcgtaatagcgccagggatcagcagaacaaacagaccaccgtgcggtgccatcagtttcgcaccaatcgccatactgattgcgccagtcagcgccccacccacgatacagcacggcagcacacgcatcggatcacgagcagcaaacggaattgcaccttcgctaatgaagcacagtcccaataccagagcggctttgccaccttcctgctgcgctttgtcgaatttgcgacgcgccaccattgttgccagacccattgccagcggtggcaccatacctgccgccataatcgccgccatcgggccataggtttgagtactcagcagacccacaccgaatgcgtacgctgctttgtttaccggaccgcccatgtcagtacacatcatgccaccgaggatcgcccccagcagaaccgcattcgcagtccccatggtctgcagccagtgagtcagcccttcgagaatgccagcaactggtttaccgatcaggtagatcatcgccagaccgaccaccagactggaaattagcggaatgatcaggatcggtttcagcgcctccatactctgtggcagtttcaattgcgtactgattaacttcgcaatgtaaccagccaggaagcccgcaataataccaccaatgaagccagaaccggtgctgaccgccagcataccgccaatcagacccggagtgaggcccggacgatcggcaatggaaaaggcaatataacctgccagtaccggcaccatcagcgcaaaggcactaccaccaccaatctgcatcagcgccgcagccaacgtacccggctctttaaacgcttcgataccaaaagcaaaagaaagcgcgatacacagaccacctgcaacgaccatcggcagcatgtaagaaacgcccgtcagcaagtgacggtatgcgcctgcactctctttcttactttcagtggtcgccgtttgagctttgcccgccggttcatacggcgttgcttcagcaaccgctttatccagttcctgcgcggttttcttcagcgccagaccggtagaggtacgatacatcggtttaccagcaaatttcgccagatccacttcgatatctgccgccacaatcaccagatccgctgctgcgacttcttcgggagtgattgcattacccgcgccaacagaaccacgggtttcaactttcacccaccagccacgttttttcgcttcggtttcaatggcttcagccgccataaaggtgtgtgctacgccagtcgggcaagcagtcaccgcaactacgcgtttcggaccgctggcggcaactggtgctgtcgcagcgaccggcgcagtgtaaggtttcgcatggcctttggcttcactcaggaacagctcagggtgcgcaactgcccgggaaatatcgcccagccagacatttttaccgttcagcgcgctgtcgttcgggatggaatcaccgagaacaatcgccatttcagcgtcgttcggattgtcgatgatttccagttttgcttttcgcgccgccgcgcccagcagggtcttcgccatataggcgcgtgcctgaccgagattagcgtcaataatcagcagcgttttcattatgcctctcctgctgtcagttaaaaggttgtaagtcgacgcgcgccatcattgcggccaactgcggacgatcggtaatacccacattgctttgacttaccgccagggctgcaacagctgtcgccagacgcagtgtgtgttcactggattcacgcatcagcaagccataaatcaggccaccaaccatagaatcccctgcgccaacggtgcttacgacatcgacactcggtggtttggcgatccattcgccggaggcattaacccaaagcgcgccttcggcacccagactaataacaacatgcgcgatgccttgttcacgtagcgcatgtgcagcttcaatcacatctttcatttcaggcagtttacggcctgcccagatttccagctcgcggcggttaggtttcaccagccacggtgccgctttcaaacctgctactaacgcttcacggctactatcaaagataatgcaaggacactgactacgcaggcgagtcatccagtcggtgaacgcttccgggctgacgccactcggtaagcttccgctgacacagaccatatcgaactgaccgagccagctcagagaatcagtcacaaagcgttcccagtcggcgggggtgacttcaaaaccgctgaagttgaagtcggtcacttcgccgtctttttccgtcagcttaacgttaattcgggtgcgcccctgtacaacctggaaacggttggcaatgcccagctcgctgaacagttgctgaaaaccatcctgattgtctttacccaggaagccgccaacggtgacatcaattcccaggtcttttaatactttggccacgttgatgcctttacccgccgcatgcagaccggtggttttcaccaggttcacttcgccgcgttcaatttccgggcagaaaccaacaaggtcataagccggattaagggtgatagtagcaacacgtctgctcattatgcgccctccccaagaccagcagcgatagcgtcgccgattgctttcagcgcctgttcagcatctgcaccctgggcggtaaagcgtaggcgatgacctttcttaacgccaagtgccacaactttcatcagactacgtccgtttgccggtttgccggtaccatcaaggtttgtcacggtaatatcactgttaaattgtttaatggtattgaccagcatggtacctggacgagcatgcaggccgtgttcattgcgcaccacaaactccgcgcttaacacgtcgtcggtcggcgcatcatcgctggtcagcagcgccagcaacgttgccgcatccgctttcagcaagcggtcagctttattgtcgagcaataaatcagcgagacgcttaagaaccgcgatgggctgatcgtcattcatcgccacactcaccagcatggctgccgtttcgccgtccacatcaaaagcatttgccgcacggcttaccgcaatcgcgctacgcagattgccttcggcgctatcgctcagccagataccctgtccgagattcagcggttgttcattgatggctttggtgacgaaagtggcgtcaactgcccccgcctctttcagacgcgcagcgttcagcgcctgaagagtcagcagatcgctggcgacgatatccagtgtcagcatttcgttgtcgagcttcagctgctcactctgcttttcgcccatcagtaatgcgcgaagttcttctgctgttgttgcactcttcagttgttcagcaacggaatcatcgctcagtacgtgggtcagctggcgtagcaggcccagatgttcatcgctgctggcagcaataccgattgccacgtacgctacctgaccgtcaccccaggtgacgccttccgggaactgaaatacctgaacgccggttttcagcacctgatcgcgggtgtcggtagtgccgtgtggaatagcaataccattgccgaggaacgtactggtttgctgttcgcgcgccagcatgccattgacgtagccttctgctacattaccggcctgcaccagcgccgcagcgacctggcgaatcgcctcttctttgtctccggccttttcgcccggatggatgtcctgtacggataactggaacatagttctcctctcttgctgaattgaaacgattcagcctctatgagaaaaaaagcgccaacctggcttagggttaaagacaagatcgcgctgaaacgtttcaagaaagcataatacttctgtttcagcacgcaaggaaagccgtaaagttatgagcaaaagtttgatgtgctgcacaattttttgccatttttcctaattgctgatgggaaaatccgttatcagcaatttcatttcagcagcgtcagcagccaatcagcaacagtgaaatggcattttgactattcgtggcgcttttgatttcgctgtctgtttattttctgacaagcagcgtaaactccgcgtcttcctcttccagtgatcgaccagcatgcataactcccccgcagtctccagcgcgaaaagctttgacctgaccagcacggcgtttttaatcgttgcctttctcaccggtattgcgggcgctctgcaaaccccgacactcagtatttttcttaccgatgaagtacatgcccgtccggcgatggtgggattcttctttaccggcagcgctgtcattgggattctggtaagtcagtttctcgccgggcgctctgataagcgcggcgatcgcaaaagcctgattgtcttttgctgcctgttaggcgtgctggcctgcaccctttttgcctggaatcgcaactactttgttttgctattcgttggcgtctttcttagcagctttggcagcaccgctaacccgcaaatgtttgcccttgcccgtgaacatgccgacaaaaccggacgtgaggcggtgatgttcagctcttttttacgcgctcaggttagtctggcatgggtcattggcccaccgctggcttatgccttagcgatgggtttcagctttacggtaatgtatctgagcgcagcggtagcgtttattgtttgcggtgtgatggtgtggctgtttttaccgagcatgcgaaaagagcttccgctggcgaccggcacgatcgaagcgccgcgccgtaaccgtcgcgatacgctgctgctgtttgtcatttgtacattgatgtggggcagcaacagcctgtacatcatcaacatgccgctatttattatcaacgaactgcatcttcccgagaaactggccggtgtgatgatggggaccgccgccgggctggaaatcccgacgatgttgattgccggatatttcgccaaacgtctgggtaagcgtttcttaatgcgcgttgctgccgtgggtggcgtctgtttttacgcaggaatgctgatggcgcatagtcctgtcattctgttgggcttgcagctgctaaatgctatttttattggcattctgggcggcatcgggatgctctattttcaggatctgatgcccggtcaggcgggtagtgccaccacgctctataccaacactagccgcgtgggctggatcatcgcaggaagtgtggcgggcatcgtcgccgagatctggaattatcacgctgtgttctggtttgcgatggtgatgattatcgccactctgttttgcttactgcggattaaagatgtttaaggcgcggtcagcatttccagatcgataagccaggtcatggcctgctgacggctgttaccgcacatttcagcgctggcttgtaagcctgcacagactttcggtcgcagtgggctggtgaaaattttacagcgttgctgttcatcaagctgaatgcagggcgtattggcgggcttgccatctggcataccgggaatagggctggaaatactaggggcagtgcaacacgccccgcaacccggacggcattccatacgttgttctcttaaggttaaccaccggattgatgagcgcgcacagtaccaccttttttgcaccagcaaaagtgcgaataccacttgcccgaaaggcccgtcgcgagtactttgtcgcgatatttttgacattttcgactacaggaatttttcgatgccaagagcgaacgaaattaaaaaaggtatggtactgaattacaacggcaaactgctgctggttaaggatattgatattcagagccccactgcccgcggtgccgctacgctgtacaaaatgcgtttttctgatgtccgtaccgggctgaaagtagaagagcgtttcaaaggtgatgatatcgttgacaccgtgacgctgacccgccgttacgttgacttctcctatgtcgatggcaacgaatatgtctttatggataaagaagactataccccgtataccttcaccaaagatcagattgaagaagagttgctgtttatgccagagggcggcatgccggacatgcaggtgctgacctgggacggtcaactgctggcgcttgagctgccgcagaccgttgatctggaaatcgttgaaaccgcaccaggcatcaaaggggcatctgccagcgcccgtaacaaaccggcgacattgagcactggtctggtgattcaggtaccagaatacttaagcccgggcgaaaaaattcgtatccatatcgaagaacgccgttatatggggcgtgctgactaacttcagccgcatgcagaaaagggatagctcaggctgtcccttttttaatttattataccaatcttctattttgcgcttcctgaacaccttacgccctcaattttcactcgttgattgatcgccctcacacttcatcgcattaacaatccagaccaatttcaattgctgtcatataactttacactgtcgttgttaattaatcgttactaagacgtgactcctatgaatacaatcgcctccgttacgctcccgcatcatgtacacgctccacgctatgatcgccagcagttgcaaagtcgtatcgttcattttggctttggagcctttcaccgcgctcatcaggcgttactgaccgatcgtgtgctgaatgcccagggcggcgactgggggatctgtgaaatcagcttgttcagcggtgatcaactgatgagccagctccgcgcacagaaccatttatataccgtgctggagaaaggtgcggacggcaatcaggtgataattgtcggtgccgttcacgaatgccttaatgcaaaactggattccttagcggcaattattgagaaattttgcgagccacaggtggcaattgtttccctgacgattaccgaaaaaggctattgtattgacccggccaccggtgcactcgacaccagtaatccgcggattattcacgatctacaaacccctgaagaacctcactccgcaccgggtattctcgtcgaagcactgaaacgccgccgtgagcgcggccttacaccgtttaccgtgctctcctgcgacaatattcccgacaatggtcatgtggtgaaaaacgcggtgctgggaatggcagaaaaacgtagcccagaactcgccgggtggataaaagagcacgtcagttttccgggaaccatggtcgaccgcattgttccggctgcaaccgacgaaagtctggtggaaatcagccagcatctgggggtgaatgatccctgcgcgattagctgcgaaccgtttatccagtgggtggtggaagataacttcgtcgctgggcgtcctgcctgggaagtcgcaggtgtacaaatggtgaatgatgtcctgccatgggaagagatgaaactgcggatgcttaatggcagccactcttttctcgcttatctgggttacctcagtggattcgcccatatcagtgattgcatgcaggatcgcgcatttcgccatgccgccagaacattaatgctggatgagcaagcgccgacactgcaaattaaagatgtcgatttaacacaatatgcggataagttaattgcacgttttgctaatccggcgctgaaacataagacctggcaaatcgcgatggatggcagccagaaattaccgcaacgcatgctggcaggtattcgcatacatcaggggcgcgaaacggactggagcttgctggcattaggcgttgcaggctggatgcgttacgtcagcggcgttgatgatgccggaaatgccattgatgttcgcgatccgcttagcgataaaattcgcgaacttgttgcgggcagcagcagtgaacaacgcgtaaccgccctgctttccctgcgtgaagttttcggtgatgatctgccagataacccgcattttgtgcaggccatcgaacaagcctggcaacaaatcgtacaattcggcgcacatcaggcgctattaaacaccctcaaaatttaacgatttctgcggttaaagcggatgaagctcaccttcgtccgctctccccttctcttttctgccttttttagccaggattaacgctcagttaacttaccagagtattgcggagccgttgtgaccaggaccaacctcatcaccggttttctcggcagcgggaaaaccacgagcattcttcatctgttagcccataaagatcccaacgaaaaatgggcggtactggttaatgaatttggggaagtcggaattgatggtgctttgctcgccgatagcggcgcattgctgaaagagatccccggcggctgcatgtgctgcgttaatggtttacccatgcaggtagggttgaataccttactgcgtcagggaaaaccagaccgcttgttgatagagccgaccgggctgggccatccgaaacagatcctcgatctgttaaccgcaccagtctatgaaccgtggatagatctgcgcgccaccttgtgcattctcgatccgcgcttgctgctggacgaaaaaagcgccagcaatgaaaacttccgtgaccagctggctgccgcagacatcattgtcgccaataaatccgaccgtacgacgcccgaaagtgagcaagcgctacagcgttggtggcagcaaaatggtggcgatcgacaattaattcacagtgagcatgggaaagttgacggtcatcttctggatttgccgcgtcgcaatttagccgagttgcccgccagcgccgcgcattctcatcagcatgtcgtgaaaaaagggttagcagcgttaagcctgccagagcatcaacgctggcgtcgcagtctgaacagcgggcaaggatatcaggcctgcggctggatattcgacgctgatacggtattcgacaccattggcattctggaatgggcgcgacttgcaccggtggaacgcgtcaaaggcgtgctgcgtattcccgaagggctggtgcgaatcaaccgtcagggcgatgacctgcacattgaaacgcaaaacgttgcgccaccggacagccgtattgagctgatttccagcagcgaagctgactggaatgccttgcagagcgcgctgttgaagcttcgtttagcgactaccgcgtaaggttgcctgcgtttttcagtaagataattagagaaaatatgattaaaaatttgccgcaaatagtgttgttgaatattgtcggcctcgcgctgtttctttcctggtatatccccgttaatcatggattctggttgccgattgatgcggatattttttatttctttaatcagaaactggtcgaaagtaaggcctttttgtggctggttgcattgaccaacaatcgcgccttcgacggttgtagtctgctggcgatgggtatgttgatgctgagtttctggctgaaagaaaacgcccctggcagacgacgtatcgtgattattggtctggtcatgctattaactgcagtggtattaaaccagctgggtcaggcattaattcctgtaaaacgggccagcccaacattgacttttaccgatattaaccgcgtcagcgaactgctctctgttcccacgaaagatgccagtcgagatagctttcccggcgatcacggcatgatgctgcttatttttagcgcattcatgtggcgttatttcggcaaagttgcaggccttatcgcccttattatttttgtggtttttgcatttcccagagtaatgattggcgcacactggtttactgacatcattgtcggtagcatgaccgtgatattgatcggtttgccctgggtgttgctgacgccattaagtgatcgattaatcaccttttttgacaaaagtctaccaggaaaaaacaaacatttccaaaacaaataactcacagtaattaacatcatcagggttatttttatagtgaggataatcctgatgatgcgcaccgtgctttcatctatcgaacgcaaaaatcattctctaagtaaatgaatggattgcatgcgtttcactcaattgtactttaattgaccaaccccgcttattaactttctgtatcactttttcttataaaaaatcatgtaaaaccgctcgccaagaccgcaccaatcgggtaatctcgaactcgttttgcctcggcggtagattatcctcacagcatataattttgtgcgttagtccacagatttggccttaaggaattgtttcaacatgcccaggtaattagtctcgtgtcgcttggcatttttttataacgatatttgtcgttaaggacttcaagggaaaacaaacaacatggtcaaatctcaaccgattttgagatatatcttgcgcgggattcccgcgattgcagtagcggttctgctttctgcatgtagtgcaaataacaccgcaaagaatatgcatcctgagacacgtgcagtgggtagtgaaacaagtagtctgcaagcttctcaggatgaatttgaaaacctggttcgtaatgtcgacgtaaaaagccgaattatggatcagtatgctgactggaaaggcgtacgttatcgtctgggcggcagcactaaaaaaggtatcgattgttctggtttcgtacagcgtacattccgtgagcaatttggcttagaacttccgcgtagcacttacgaacagcaggaaatgggtaaatctgtttcccgcagtaatttgcgtacgggtgatttagttctgttccgtgccggtagtacgggacgccatgtcggtatttatatcggcaacaatcagtttgtccatgcttccaccagcagtggtgttattatttccagcatgaatgaaccgtactggaagaagcgttacaacgaagcacgccgggttctcagccgcagctaataaaccgtttggatgcaatcccttggctatcctgacgagttaactgaaagcactgcttaggcagtgcttttttgttttcattcatcagagaaaatgatgtttccgcgtcttgatccaggctatagtccggtcattgttatcttttaaatgttgtcgtaatttcaggaaattaacggaatcatgttcatacgcgctcccaattttggacgtaagctcctgcttacctgcattgttgcaggcgtaatgattgcgatactggtgagttgccttcagtttttagtggcctggcataagcacgaagtcaaatacgacacactgattaccgacgtacaaaagtatctcgatacctattttgccgacctgaaatccactactgaccggctccagccgctgaccttagatacctgccagcaagctaaccccgaactgaccgcccgcgcagcgtttagcatgaatgtccgaacgtttgtgctggtgaaagataaaaaaacattctgtagttctgcgaccggtgagatggacattccactcaatgaattgattccggcgctcgacattaataaaaacgtcgatatggcgatcttacccggcacgccgatggtgccgaacaaacccgcaatcgtcatctggtatcgcaaccctttgctgaaaaatagcggcgtctttgccgctctgaatctcaacctgacgcctagtctcttttatagtagtcggcaggaagattacgatggcgtcgccctcattattggcaatactgcgctatctaccttttctagtcgtttgatgaacgttaacgaattaaccgacatgccagtccgtgaaactaaaattgcgggcattcctctgaccgttcggctttatgcagatgactggacatggaacgatgtgtggtacgcatttttactgggcggcatgagtggaactgtcgttggcctgctctgctattacctgatgagcgtacgtatgcgccccggcagagaaatcatgaccgccatcaagcgcgaacaattttacgtggcgtatcaaccggtggtggatacacaagctttgcgagtaacgggcctggaagtactgctacgctggcggcatcctgtcgcgggagaaattcccccggatgccttcattaactttgccgaaagccaaaagatgattgtgccgctgactcagcacctgtttgagttaattgcccgcgatgccgcagaattagaaaaagtgctgccggtaggcgtcaaatttggtattaacattgcgccggaccatctgcacagcgaaagctttaaagcagatatccagaaactgctcacttccctgcccgcacaccatttccagattgtgctggaaattaccgagcgcgatatgttgaaagagcaagaagccacacaactcttcgcctggctgcacagcgtcggcgtagaaattgctattgatgacttcggcaccgggcacagcgcgcttatctatcttgagcgttttacgctcgattatctgaaaattgaccgtggatttatcaacgccatcggtacggaaacgatcacttcccccgtacttgacgcggtgctgacgctggcgaaacgcctcaatatgctgacggttgctgaaggggtcgaaacgccggaacaggcgcgatggctaagcgaacgcggcgttaatttcatgcaaggctactggattagccgcccgttaccgctggacgattttgttcgctggctaaagaaaccgtatacgccgcagtggtaaggtgtgcttacgtcccttattattcatagtgaaagcatgccggattgcggctaatgatgagtaaaaggaaatccgttgcagatgattgtgcgcatactgctgctgtttatcgctctgttcacctttggtgtgcaggcgcaggctatcaaggaaagctatgcctttgccgtgctgggcgaaccccggtacgcgtttaatttcaaccattttgattatgtgaaccccgccgcgccaaaaggtgggcagataacgttgagtgccctcggcaccttcgataatttcaaccgctatgcactgcgcggcaacccgggcgcacgcaccgagcagctgtacgacacgctatttacgacttccgatgacgaaccaggcagttattacccgctgattgctgaaagcgcacgctatgctgacgattattcctgggtggaggtcgctattaatccgcgcgcccgttttcatgatggtagccccattactgcccgcgatgtagagtttacttttcaaaaatttatgaccgaaggcgtgccgcaatttcgtctggtctacaaaggcaccaccgtcaaagccattgcaccgttaaccgtgcgcattgagttagctaaacccggcaaagaagatatgctgagtctgtttagcctgccggtatttccagaaaagtactggaaggatcacaaacttagcgacccgctcgccacgcctccgcttgccagtggtccgtaccgcgttacgtcctggaaaatggggcaaaatattgtctattcccgtgtgaaagattactgggcagcaaacttaccggtaaaccgtggacgctggaatttcgacaccattcgctacgattattacctcgatgataatgtcgcctttgaagcgtttaaagcaggtgcctttgatttgcgtatggaaaacgacgccaaaaactgggccacgcgttataccggtaaaaatttcgataaaaaatacatcatcaaagatgagcaaaagaacgaaagtgcccaggatacgcgttggctggcgtttaatatccaacgtccggtattcagcgatcgccgggtccgggaagctatcactctcgcctttgactttgaatggatgaacaaggcgttgttttacaatgcctggagtcgcacgaacagttattttcagaataccgaatacgcggccagaaattaccccgacgccgcggagctggtgcttctggcaccaatgaaaaaagatctaccgagtgaagtcttcacacaaatctaccagccgccggtatccaaaggcgatggctacgatcgtgacaacctgttaaaagccgacaaacttctcaacgaagcgggctgggtgctgaagggtcagcaacgcgttaatgccacaacgggtcagccactcagctttgaattattgcttcccgcaagcagcaatagtcagtgggtattgccgttccagcacagcctgcaacggctgggtatcaacatggacattcgcaaggtggataacagccaaatcactaaccgcatgcgcagtcgcgactatgacatgatgccgcgcgtatggcgggcgatgccgtggcccagttccgatttacagatttcctggagtagcgaatatatcaattccacttataatgcccccggcgtgcaaagcccggttatcgacagcctgatcaaccaaattattgccgcgcagggaaataaagaaaaattactgccgttggggcgagcactggatcgcgtattaacgtggaattattacatgctgccaatgtggtacatggcggaagaccgtctcgcctggtgggataaattctcccagccggccgtgcgccccatctatagcctcggtatcgatacctggtggtatgacgtcaataaagcggccaaactgccgtccgccagcaaacagggagagtaaatgggcgcttacctgattcgccgtctgttgctggtgatcccaacattatgggcgattatcaccatcaactttttcatcgtgcaaattgcgcctggcggtccggtcgaccaggccatcgccgccattgagtttggtaatgccggagtattacccggcgcaggcggtgaaggtgttcgtgccagccatgcgcaaacgggtgtcggcaatatcagcgacagtaattaccgtggcggacgcggattagatccagaagtgatcgctgagatcactcatcgctacggttttgataagccgatccacgaacgttacttcaaaatgctctgggactacatccgctttgattttggcgatagcctgtttcgcagcgccagcgtgctgacgctgattaaagacagtctgccggtttccatcaccctcggattgtggagcacgctgattatctatctggtgagcattccgttaggcattcgcaaagctgtttataatgggagccgctttgacgtctggagtagcgcatttatcatcatcggctacgccattccggcctttttgtttgccatcctgctgattgtcttcttcgcgggcggcagctatttcgacctgttccctctacgcggcctggtttccgctaactttgatagcctgccgtggtatcagaaaatcaccgattatctgtggcatatcacgctgccggtgctggcgacagtgattggtggctttgcggcgctgaccatgctgacaaaaaacagtttccttgatgaagtgcgcaagcaatacgtggtgaccgcgcgtgcgaaaggggtaagtgaaaaaaatattctctggaaacatgtgttccgcaacgccatgctgctggtgattgccggttttccggcgacgtttatcagcatgttttttaccggcagcctgctgattgaggtgatgtttagtctcaatggtctgggcttactgggctacgaagcgaccgtcagccgcgattatcctgtaatgtttggtaccttgtatattttcaccctgattggcctgctgctgaatattgtcagtgatatcagctatacgctggttgatccgcgtattgattttgagggacgttaatgagccgactcagccccgtcaatcaggcccgttgggcgcgttttcgtcataaccgtcgcggctactggagcttatggattttcctcgtcttgtttggtttgagtttgtgttctgaacttatcgccaacgataaaccgttgctggtgcgttatgacggcagttggtatttcccgttattgaaaaactacagcgaaagcgattttggcggcccgctggcaagtcaggctgattatcaggacccgtggctgaaacaacggctggaaaataacggctgggtactgtgggcaccgattcgctttggtgctaccagtatcaactttgctaccaataagcccttcccttctccaccctcccggcaaaactggctgggaacggatgccaacggcggcgatgtgctggcacgcattctctatggcacgcggatcagcgttctgtttggcctgatgctgactctctgttccagcgtgatgggcgtgctggcgggggcgctacaaggctattacggcggtaaagtcgatctctggggacaacgctttattgaagtatggagcgggatgccgacgctgtttttgattattttactttccagcgtcgtacagcctaacttctggtggctgctggcaattactgtcttgtttggctggatgagtctggtcggcgtggtgcgggcggagtttttacgtactcgtaatttcgactacattcgtgcggcacaggcgcttggcgtcagcgatcgcagtatcatcctgcgtcatatgttgcctaatgccatggtcgcgaccctcacctttttaccgtttattttatgtagtagcataaccaccctgaccagcctcgatttcctcggcttcggtctaccgctcggtagtccgagtctcggtgaactgctgttacaagggaaaaataaccttcaggccccgtggcttgggatcaccgccttcttgagcgtggcgatattattgtctttgctgatctttattggtgaagccgtccgcgacgcatttgatcctaataaggcggtgtaacatgacgcaaactctgttagcgattgaaaatttgagcgtgggttttcgccatcagcaaaccgtacgtacagtagtcaatgatgttagtctacagattgaggctggcgaaacgctggcgctggtgggtgagagtggtagtggcaaaagcgttaccgcgctgagtattttacgcctgctcccttccccgccggttgaatatctctccggcgatattcgttttcatggcgaaagcctgcttcacgccagcgatcaaacgttgcgcggtgtacgcggtaataagatcgccatgatttttcaggaaccgatggtgagcttaaatccattgcataccctggaaaaacagctttatgaagtgcttagtctccaccgcgggatgcgtcgggaagcggctcgtggcgaaattcttaactgccttgatcgcgttggtatccgccaggcggcaaaacggctgacagattatccgcatcagctctccggcggcgaacggcagcgggtgatgattgcgatggcgctgttaacgcgaccggaattattaattgccgatgaaccgaccaccgcactggacgtctctgtccaggcgcagattttacagctgttgcgcgaactgcaaggcgagctgaatatgggcatgctgtttattactcataacctcagcattgtcagaaaactggcccaccgcgtggcggtaatgcaaaacggtcgctgtgtcgagcaaaattacgccgctacgctatttgcaagtcccactcatccttacacacaaaagctactcaacagtgaaccgagtggcgatccagtgccgttgccagaacctgccagtacgttgctggatgttgaacagcttcaggttgccttccccattcgcaaagggattttgaagcgcattgtggatcataatgtggtggtgaaaaacatcagttttacgctacgagcgggtgaaacactgggtttagtgggcgagtccggttccgggaaaagtacgacgggactggcgctgctgcgactgattaattctcagggcagcatcatctttgacggtcagccactgcaaaatttaaatcgccgccagctgttacctattcgtcatcgcattcaggtggtatttcaggatccaaactccagcctcaacccacgactcaacgttttgcagattattgaggaaggcttacgggttcaccagccgacgctttctgccgcacaacgcgaacaacaagtgatagccgtgatgcatgaagtgggattagatcctgaaacacgccaccgttatccggcggagttctctggtggtcagcgacaacgtattgcgattgccagggcattaattcttaagcccagcctgatcatacttgatgaaccgacaagtagtctcgacaaaacggtacaggcgcaaatattgacgctattgaaaagtttgcaacaaaagcatcaactggcctatttgtttatcagccacgatttgcacgttgtccgcgcgttatgtcatcaggttatcatactgcgacaaggggaagtagtggaacaaggaccgtgcgcgcgcgtgtttgccacaccgcagcaggagtatacgcgtcagctactggcgttgagctgacgcttaaaaaggattgtagttactaaagggttcggcaattgccacaccaaaatttttcaatcggcatgttgcagcaaactcgtcctggcgatttacaaacaggcacggctcaccttcacactccagcacgctacatggaacttcgatgtcgcttaacgcctggcttagtttatacatcacgctccatgcattatcaccatccgggctaagcaatttaagcgccaccaggctgttgtcaccgcacggtccattttgcggaatcggttcaaccttgctacctgcgaaaccagcagaccagcgatagttctgcggcagtcgatggacgatactgagttgtaaactagtcacttattttccccggaagcacattcacttcacaatttgtttacatcaattttaacacatcatcaacaatccgtctttatacagatcgtaaagattgatgcctcgcctgcgtggcctctatggctctgatttaagtaatatctgcgggcgtggtcacgtttgcggggctatatgtacccgtttctgcgatctaactcaacctttttaactacaatgatgtgactttttacataaattgattttacataaaataaacatatatcgggggaatgatagatttgtggttgacatgcatcaacaaaggaagccttttagcttcctcgttgtgcaatagatcaccgttttttcggccgactggcgtacagacagaagagaatggagctggttgcgcagaatgcaatactccaaatcatcggccatgcagagttaaaggtcgcaagagaaagcaatgcgccaacaattgcccctatgccaaaacggaaggttcctgccaggctagatgccgttcccgccatatggggaaactcatcaagaatgaccgccatcgcattggaactcaccatgctcacgcagcccacaaacgccgcaacgccaaccaccaggctccaaaatcccagccccagcagcgcactgatgaccatccacgctgccataataaattgtatccacaacccgctgcggaacatatttaacgcgccaatgcggcggacgaagcggctgttaaagatggtcatcacgaacagaaaaacaatgtttagcgcaaagtaataaccaaagttttccggcgcgacgtggttaatttcaatataaacaaacggtccggcgcttaagaaactgaacatcccggcaaagctgaaaccactggcaagcatgtagctcaggacacgtttatggcggaacagcgccgcaaagttaccaatagtggtacgaatgtgaaatggctgacgacgctccggtggtaaggtttctttaatcaggaagaaaatcattgcgctagccagaatcgccgctaatgccaggatccagaagatgtaatgccagctcagccacaccagcacccagccgccaactatcggtgccatcagcggtgcaatggttgtcaccagcatgacaaagctcatcatccggctgaactcttctttcgggtaaatatcgcgcatcagggcgttaatgaccacgctggccgcagccgcagccagcccgtggaagaaacgcatcacaatcagctgatcgatggtgtttgccaacgcacacgccaccgcggcggcggcaaacaccagcgtaccgccgagcaccaccggcttacgcccgaagctgtctgccatcggcccgtagattaactgccccaacgcaaagcccagaatataagtactgagggtcatctgcgtactgcccgccggtacgccaaactgcgcactaattaccggtagcgcgggcagatacatatcaatgctcagcggcatcaacatggccagcaggccaaggataaaaacaatagcaaagctgctatgctgtcgggtggtcacaacgggctcctgaaagtcattgaaaagttagacgacgctggcaatttcttcttcagttaacggacgatattcaccgggggctaaatcagcatccagcgtaataccgccaatacgttcacgatgcagctcaaccacgtggttacccacggcggcgaacatgcgtttcacctgatgataacgcccttcgctgatggtcagacgaacctgcgttggggtaatcacttccagcaccgcaggcttagtgagatctttttcgttatgcagctgcacgcctttagcaaattgctctgccgtatcgtcagctacaggactttccagtgtcaccagataggtcttctcgcaatgatggcgcggagaagtaatgcggtggctccactgaccatcatcagtcatcagcaccagaccggtggtatcaatatccaaccgccccgccgcatgcagtttccacgctaccggttcatcaagaaaatagagcaccgttgggtgatcagggtcgtccgtggagcaaacatagccctgaggcttattgagcatgaagtaacgtggaccgtgttgctgcgccagcgggttgccatcgtaagcgacatcatgttcaggaagcagtttgaacgctgcattacggacgatttcgccatcgacggtgacacgattgccgcggatttcacgcccggcaatagcacggctaacgccgagttgctgtgcgataaatttatcaagtcgcatgtgtgtgattttgcctgtaaaaacggaggtcgggcattgacccgaaaatctgaactgttgtctgcccagtatagcggtctaataacatccctcaagggaaaaagatccatggcatactattagcagaataatctacctacgcgagaccatgatttttacacttcgcccatatcagcaagaagccgtggatgccacgctcaaccattttcgtcgtcataaaacccctgccgttatcgtgctgcccaccggcgcaggtaaaagcctggtgatagcggaactggcacggctggctcgtggtcgcgtgctggtgctggcacacgttaaagaactggtggcgcaaaaccatgcaaagtatcaggcgctggggctggaagccgatatttttgccgccgggctaaagcgcaaagagagccacggtaaagtggtatttggcagcgtgcagtctgtcgcccgtaatcttgatgcctttcagggtgaatttagcctgttgattgtcgatgaatgtcaccgtattggtgacgatgaagagagccagtatcagcaaatcctcactcacctgacaaaagtgaatccccacttacgcctgctggggctgactgccacgccttttcgattgggcaaaggctggatctaccagtttcattatcacggcatggtacgcggcgatgagaaagcccttttccgtgactgcatttatgagctgccgctgcgttatatgattaaacacggctatctgacgccgccagaacgactggatatgccagtagtgcaatacgatttcagccgcttgcaggcacagagtaacgggctgttcagcgaagccgatctcaaccgtgagctgaaaaaacaacaacgtattaccccgcacatcatcagccagattatggagtttgctgcaacgcgcaaaggggtgatgatttttgccgcgacggttgaacacgcaaaagagattgtgggattactgcctgccgaagatgcagcactgattactggcgacacccccggcgctgagcgcgatgtgttaattgaaaattttaaagcccagcgttttcgctatctggtcaacgtcgcggtactgaccaccggatttgacgccccgcacgtcgatcttatcgccattctgcgccctaccgaaagtgtgagtctttaccaacaaattgtcgggcgcggtctgcgtctcgctccgggcaagactgattgcttaattcttgattatgcgggtaatcctcacgatctctacgcgccggaagttggtacaccaaaaggcaaaagtgacaacgttccggtacaggttttctgccctgcctgcggttttgccaacaccttttgggggaaaacgaccgccgacgggacattgattgaacactttggtcgtcgctgtcagggatggtttgaagatgacgacggtcatcgcgaacaatgtgacttccgtttccgttttaaaaattgcccgcaatgtaacgcggaaaacgatattgccgcccgccgctgccgcgaatgtgacaccgtactggttgatccggacgatatgttaaaagcggcgctacgactgaaagacgcgctggtattacgctgtagcggcatgtctttgcaacatgggcacgacgagaaaggcgaatggttgaaaatcacctattacgatgaagacggcgcggatgtgagtgagcgtttccgtctgcaaacacctgcccagcgtaccgccttcgagcagctttttatccgcccgcatacgcgcacaccgggcatcccgctgcgctggatcaccgccgccgatatcctcgcccagcaagccttattgcgacacccggattttgtcgtcgcccgcatgaaaggccagtactggcaggtgcgtgaaaaagtgttcgattacgaaggtcgttttcgtctggcgcacgaattacgcggttaatggtagttttgattgatgtataaggcgattgagtatagaatctcgcccgcttttgcatacgcaaagcagatcacttacctgttgctgggtcgcctgtagcaggattaatttaagagagaaagaaatgtttactatcaacgcagaagtacgtaaagagcagggtaagggtgcgagccgccgcctgcgtgccgctaacaagttcccggcaatcatctacggtggcaaagaagcgccgctggctatcgagctggatcacgacaaagtcatgaacatgcaagctaaagctgaattctacagcgaagttctgaccatcgttgttgacggtaaagaaatcaaagttaaagctcaggacgtacagcgtcacccgtacaaaccgaagctgcagcacatcgacttcgttcgcgcttaattgctgaataagttgtaaaaaaccccgctccggcggggttttttgtatctgcagattatgcctgattacggtattgctattttttgcaggccagataaggcgttcacgccgcatctggcattcagaacacaaaaccgattaattgccgccagacgtccggcgctgcaattggtcgcgcaaattcggcggcgtgcctttaatggtcaaggtatcggttgctggatcccagaagatgcgttcacctaacagcatcgcatcaaagttaatagtcaagccaccgccgctaccggcaaacttcgtcaactgacgcagtgtgctacggtctgccgggaagctctcttccagttcgtagcctttttcagccgcaaactccgtgaagctcacttcgcttacgcctgccagctctttgctcaggcttttcagttcgatctcttcgcctgcctgcagctgctcattacagtagctataaacctgctggcgcacgttctgtcgctctgctttatccagttgtgcttcggcagtgaaatcatcaaccgcttgcaacagcccacggttttgcgctttcgcgtttaacccttcgctggccccgaggaaatccataaagaaatccgccactttgcgccctactcgccctttcaggaaagtgagatagcgggtggactctggattggtttcccattcggttaaatcgatacgcgcaacaatatccgcatgattgatatcaagataatgggttgggttgatgtcgagattttcgttaacgcgcatactgctcaggttgctcagaactgccaccagcaaatactccaccgccagatagcgatagtggcaaaacagcacgaatccaccgtcagcaaaaggatatttcgctaattcgtcacgcaggcggccggttgccgcgcggctaaatgccaggaagtcctcttcgccctgacgctgtaagcgcagcgtctgcgccagttcactctcttcgctaaacaagccgtaagctttatttttggcgctatagacccgatgcagttctgccaccatctcaacgacggtttctgtcggttccagcaaactatcgcgcaacaccagctcaaggttctgctcatcacgcttgataagctggtgcagagcaatctggttgatatccagactcatgataaactctcctttaagaccgggcggtattcaaccaccgccggttaagcgacgcaataaaagatggcggtcattttacagaaggcagcgtaacgagaatgatttaacgcataaaaaagcagaaaaaaaaccgttgctacggtaatatgttgccctttcatcaactaactgatttcgatttatgccacaaatttcccgctacagtgatgaacaggttgaacaattgctcgcagagctgctcaacgtactggaaaaacataaggctccgaccgacctttccctgatggtgttaggcaacatggtcactaaccttatcaacaccagcattgccccggcccaacgccaggcaattgccaactcttttgcccgcgccttacagtcctctatcaacgaagacaaagcgcactaagggaaacagataacaggttatggtaactcatcgtcagcgctaccgtgaaaaagtctcccagatggtcagttgggggcactggtttgcactgttcaatattctgcttagcctcgtcattggcagccgttacctgtttatcgccgactggccgacaacgcttgctggtcgcatttattcctacgtaagcattatcggccatttcagcttcctggtgttcgccacctacttgctgatcctcttcccgctgacctttatcgtcggctcccagaggctgatgaggtttttgtccgtcattctggcaacggcgggaatgacgctattactgatcgatagcgaagtctttactcgtttccatctccatcttaatcccatcgtctggcaactggttatcaacccagacgaaaatgagatggcgcgcgactggcagctgatgttcatcagcgtgccggttattttattgcttgaactggtgtttgcgacgtggagctggcaaaagctgcgcagcctgacgcgtcgtcgacgcttcgcgcgcccgctggccgcattcttatttatcgcctttatcgccagccatgtggtgtatatctgggccgatgccaacttctatcgcccgatcaccatgcagcgcgctaacctgccgcttagctacccgatgacggcgcgacgttttcttgagaagcatggtctgcttgatgcgcaggagtatcaacgccgtcttattgagcaaggtaatccagacgccgtttccgttcagtatccgttaagcgaactgcgctatcgcgatatgggcaccgggcagaatgtgctgttgattactgtcgatggcctgaactacagtcgcttcgagaagcagatgcctgcgctggcaggttttgctgagcaaaatattagcttcacgcgccatatgagctccggcaacactacagacaacggcatctttggcctgttctatggcatcagcccgagctatatggacggcattctgagcacccgtacgcctgcggcattaattactgcgcttaatcagcaaggctatcagctggggttattcagtagtgatggctttaccagcccgctgtatcgccaggcattgttgagtgatttcagcatgccgagcgtacgcacccaatccgacgagcagaccgccacgcagtggatcaactggctgggacgctacgcacaagaagataaccgctggttcagctgggtttctttcaatggtactaacattgacgacagcaatcagcaggcatttgcacggaaatatagccgggcggcaggcaatgtcgatgaccagatcaaccgcgtgctcaatgcactgcgtgattctggcaaactggacaatacggtggtgattatcactgccggtcggggtattccactgagcgaagaggaagaaacctttgactggtcccacggtcatctgcaggtgccattagtgattcactggccaggcacgccggcgcagcgtattaatgctctgactgatcataccgatctgatgacgacgctgatgcaacgcctgctacatgtcagcacacctgccagcgaatatagccaaggtcaggatttgttcaaccctcaacgccgtcattactgggttaccgcagcggataacgatacgctggcaattaccaccccgaaaaagacgctggtactgaacaataacggtaaataccgcacttacaacttacgtggtgaaagagtgaaagatgaaaaaccacagttaagtttgttattgcaagtgctgacagacgagaagcgttttatcgctaactgattaattataaatcagttagcgaaatatcttacttgcaatcggtgtggaaaacggtagtattagcagccacgagtcggcacgtagcgcagcctggtagcgcaccgtcatggggtgtcgggggtcggaggttcaaatcctctcgtgccgaccaaaaatcccaagaaaaaaccaacccttacggttggtttttttatatctgcaattaattcgataaacagaccgtgacacatcacagcctgtttattttctgttatcagaacgtcctgagctttcatcctatgaaattaattgctgttaaaagcattgggtacagaaaatacccatagctccatacccggagtcagtttttaaaaactgtttaaagaaatgcacaagtattgtgattgattttttagttgtttttcttgatgagaagctgatgcaaaattccgtctttataatgaaaatgatgccaaagcgaacgacaaggttgtagttttcactacatgtccatacataaaatggggtaacattcacgcgcctggtagcgttaccaacgctacgctcaaacataatgattctaataaaacctcaggagactactatgcctgaagcaacaccttttcaggtgatgattgtggatgatcatccacttatgcgacgcggtgttcgtcagttactggagcttgatcctggctctgaagtggtcgccgaagcgggcgacggcgcgagcgctatcgatctggcgaatagactggatatcgacgtgatcttgctggatctcaatatgaaaggtatgagtggcctggatactctcaatgccttgcgcagggatggcgttaccgcgcaaattattatcctgaccgtatccgatgcctccagcgatgtctttgcgctgatagacgcaggcgcagacggttatctgttgaaagacagcgacccggaagtattgctggaagcgattcgtgccggagcgaaaggcagcaaagtctttagcgaacgcgtcaatcagtacttacgtgaacgtgaaatgtttggcgcggaagaagatcccttcagcgtgctgacggagcgcgagctggatgttctgcacgagctggcacaggggctgagtaataaacagattgccagcgtgttgaatatttccgagcagacagtaaaagtacatattcgcaatctgctgcgtaaactcaatgtccgcagtcgcgtggcggccaccattctgttcctgcaacaacgcggggcacaataaaaatagcccgatggatttatcatcgggctgagatttatgacaaacgcaaaactgcctgatgcgctacgcttatcaggcctacgtggatcgatcaatttattgaatttacacaattttgtaggccggataaggcgttcacgccgcatccggcataaactaagcgcactttgtcaacagtctagcccgatggcatcaccatcgggcctctttttatttactctcctgcgggctcaaatgttgcatcgcctgcgcgatactacgttcaatcaccgcacggcgagtatcgttggcaggtaagagtttcaacatcatctcccacgcggcaacggcttcgccaaatcgctgctgctcaaaggcattaaacgcatacatgcttagcacacggatattgctatggtccgttctcaccagctgacgtagcagttcaccgccgaggcggttgtcgttgggatcagaactacgagtcaacgcttcagcgtatcccagtgcagcatcactgtttttcggatcgaggcgatacgcagtggcgtatgcatcggtggcgatactggcgttacccagcgccatgccaacgcggcccaacataatccagccttctatatctcccggatttttttgcagttgagtacgcatccccagcgcaagacggctcatctcttcttcgttgagcggatcggctttcggatccagcgccctgtccagcaacgccggagcctgtgccgtggcctgctgccagattttcacctgctgataattgccagtctggtagtagctgacgccagccacaattaacgccaccacaatacccggcagataaacaacatatccggcacgcttaccttccggcacgctttgttcaggaaacgcttccggcaccacgcgtacccgacgccggctgcgggcgtatatgacccaaccgccaatgccaatagccactactggcagcacccacagcagcacggtcagcggcgttaacggcggatcgtaagtgacgaagttgccgtaacgcgccaccatataatcgacaatctcttttttacttttaccttcctgcatcagttcatacactttctgacgcaggtcggtggcaatcatgctgttggaatcggcaatgctgttgttctggcatttcgggcagcgcagttcttcagtgagctgacggaactgttgttcctgtgcttcatctttaaactgcaacacatcgatggtcgccagcgcactgccggagatcatcagcatcagcacgcccaataaaaacctcattgtgcggcctccttactgtatttctcccacagcggcttgatctcttcttcccagacgcgaggattcagatcgcccgcatggcgatagcgaatgatgccgttgccgtcaataagaaacgtttctggcgcgccatagacaccgagatccagccctaacatgccatcgccatcaaacaggcttagcgcgtaaggattgcccagctctttcagccagctgattgccttctggcgatcgtctttatagttcatgccgaccacgcggatgccctgcgcagaaagctgattcagatattgatgttccgcacggcaggtcggacaccaggtcgcccagacgttaagcagtactggtttgccctgagtcagcacatccgcctgataaaactgccccggattgtccagactttcgagacgaaacttcggcacaggcttgccaatgagcgcgctttccagattggtcggatcatccccttcggcattacgcgccagctgccacagcagcgccgcggcaatcgccaggaagataatcaacggaattaacaatactttgcgcttcatacggcctccggcgcagttttttgcggactcacgcgcttacgatagcgaggatcaaacagacacagcagtccgcccaacgccatcatcagcccgcccgcccaaatccagcgaacaaatggtttgtagtaaagacgcacggcccacgcgccgttttccagctcttcaccgagggccgcgtacaggtcacgcgtgatgccgccgtcaattgccgcttcggtcatcatgctcccggcagtgttgtaataacgtttttccgcatacagcaccgtttccggcttgccatcgcgcgttacgccgatagtcgccacaccgccacgccagttcgggccagtcacctctttgacatcacggaaggtgaagcgatattcatgaatatcgacgctatcgccggacttcatgcgcacatcacgctcaacgctatagttctggctaaaggcaatgccaacaattgtcactgccagcccaaggtgagccgccaccatcccccaataactgaaggtggttttcgtgccgcgactaatacgtagcgcagcttccgcaattgccagcaccgcaatccagcaggccattgccaggccgagcaccgtcatcgccacaactttgctttcgaacagccacggcaacagcaggctcagcaccagcgtagagatgaaggcgataatcaataaattgcggatcttacgcgggcgatcccgcccccagcgcaccagaggaccgacaccaagcagtagcgcaaacggcaccatcagccaggtaaacatggtgttgaagaacggttcgccaatgctaatactgcccagtcccagttgcttatgcaccaacggcagcagcgtccccagcaacaccaccagcatcgcagcgaccagcaaaacattgttcgctaacagcaaagattcccggctccacagcgcattgtttacgcgactgcgaactttgtgtccacgcgcggcaaacagcagcaggctaccgccaatcaccagcaccataaaggcgaggataaacataccgcgcgccggatcagacgcaaacgcgtgtacgcttaccagcacgccggaacgcacgaggaaagtccccaacagacacaagctgaaggcactgattgccagcagtaatgtccacgctttgaagctggcgcgttgttcagtgaccgccagactgtgcatcagcgcagtccccaccagccacggcataaagctggcgttttctaccggatcccagaaccaccagccaccccagccgagttcgtaataggcccatgcggaaccgagcacgatgccgagcgtcaggaagatccacgctgccagcgtccacggacgagtaaaacgcgcataagtgctgtccagacgcccgctcagcaaagaagcaatggcaaaagcaaacgccacgctgaaacccacgtaccccatataaagcagaggcggatggaagatcagccccggatcctgcaatagcgggttaagatcgcgaccttcaatcgggaagttcggcaacgtgcgagagaacgggttagaggtaaagagaatgaacagcaaaaagccgacactgaccatccccattatcgccagtacacgggccacaatatccagcggaatacgctgactaaaaatcgccaccgcaaaggtccagccgctcatcagcagcacccacagcagtaggctgccttcatgcgcgccccaggtagccgccacgcgataccacaccggaagctgggtattggagttgctggcaacataggtgacggtgaagtcgttgaccacgaaagcattgaccagcaccagaaatgcgccagccacagacataaacagcagccaggcaaacaagcgggaagacgccatcatgcgcgcatctccgcgcgccacgccccatagcggatacacggacagcagcagcgcaattcccagcgccaggcacagcagtccgttaccaatttctggcatcatgatgctgggtccttataaacttacgtcaacttgctgggtccttataaacactcgccgggcgacggtggttagcttccatcgctttctcaacttctggcggcgtatagttttcatcgtgtttcgccagcacttctttcgcgaggatatgattgcctttttccagttcgccctgcaccacaacgccctgcccttcacggaacagatccggcaaaatgccttcgtaagagacatccacactgccttcagcatcgtaaatggtgaaggtcactttcaggctattgggatcgcgctgcacactacccggcatcaccatcccgccaacgcgcagacgctgaccgacttccggcatttgctgagtttcacgcttgccgtagagaatttcccccggcgtataaaagagatcgatattgctgcgcagcgcatatagcaccagaccgatagtcagcgccagccctgccaacacggcacaggcaatccacaagcggtttttacggcgaatattcatgcagcctcctgctgttgcgcagcacgtaaacgcgcctcacgcgcccgctgttgcgccacgccacgcagaattgcgcgatgttgcatcacgctgtgcacgaccaaaaccaccagcggaataacggtcatcaccaccgccagccagacaaaaaaggcgtaaccgcccattgcgaaaaattcattccaggaagcaaatgcaggggtcatttacggcctcttttcagtatcagttcactcacccacggacggcgtttttccatcagcaaaatcaaattacgcatccgcatcagcgtcagcgtggcagacaggagcaggaagccaaaaatgctccagcgcagcgggctacgcatcgccggatcgatactttgctgcatccgcgtacttccctgatgcagggtgttccaccactccacggagtaatgaataatcggcagattcaccacgccaatcagcaccaggatacctgccgcacggcccgccagacggcggtcgtcgaaggcgtgccacagggcaatcacacccacatacaaaaacagcagcaccagttcagaagtcagacgtgcatcccatacccaccaggtgccccacatcggttttccccatgcagagccggtaaccagggcaataaaggtaaacacggcaccaatgggggccatcgccgccaccgccaggttggccattttcatctgccagacaaggccaataaacgctgccactgccatacttgcataaatgcccatgctccagatcgccgcaggcacatgcaggtagataatgcggtagctatttccctgctgataatcagccggagcaaagccgaatccccagatccagccgacggtaagcacgaccacactggcaattgccagccacggtataaaccagccacagatttgatacagccgtggtgggatcgccagttgatgcagtgttttccacatagtttcgataccagactcgaacaaaaatcagtaatccagcgttattgaatgctgattcgtaacgctgccgccgtcgcaaaaggacttaatgtcgcggtgcctgccagcaacgcgcctaaaattgccagatacccgtcaacgggcaaatgcatagaagccgcgtccatcgcggcggtggcaaagatgagtaatgggatagtcagcggtaacaccagtatgctgagcagcacaccaccgcgcttaagtcccactgtcagcgccacgcccggtgcaccgagaaagccaagcgtaggcgttcccagcagcagcgtcagcgccatcacttgccagccataaacatccattcccagtagcattgctaccagtgggctaaggatgagtaacggcagaccggttaccatccagtgcgccatcaccttcgccagcacaacggcgggcaagggtaacggcaacaacatcaattgttcaagactgccgtcctgcaaatcgtcacggaacagtcgttccagcgccagcaaggaactaagcagcgcagcaacccagataatgcccggtgcaatacgcgccagcagttgcggctccggaccgatactgagcggaaaaagggtaattacaatcaggaagaaccacagcgggttggcgatttcggcgctatggcgaaacgctacacgcagctcaagacggaaaatgcgccagaacatcatgcggccctcgtttgcgtcagactaatgcggcgaattttactttcagcaacgttgagcggctggtgggtagtcagaatcacaatccccccctgctccgtatgctgcgccatacgctgggtcagacgatcgacaccgttaacgtcaatcgcggtaaaaggctcgtcgaggatccataacgtggcacgggtcagccacagacgcgctaaagcgacgcggcgttgttgcccggcgctgagctgatttacaggaatatcttcgaatccggcaagcccggcctgcgccagggcttccagacattgtgcggtatcgccatcgcgatgataaaagtgcagattttctaacgccgtcagccgggttttgatccccggctgatggcctatccataacaggttttgatggtagctgtcgcgtacctgatgcaagggctgcccttgccagagaacctcgcctgcgtcagggcgagacaaccccgtcagcaaacggagaagcgttgtcttccccgcgccgttgctaccggtgatttgtacccactctcctgcgttcagcgtaaaactcaagccactaaataaggttcgttcatcccgctcacaaagtaactctctggcttcaagcatacccacgcaataaccctgttaaaaacctggctcgacttcacgcatatcgggcagcttgtgcgctatccctttatggcaatcaatacaggtttgcccatctttcaccgcctggtcatgcatcttcgcggcaacgcttttctgggcggttgtatccatatactcgaagttgtgacagttacggcactcctggctgttattgtccttcatgcgccgccactcattctgtgccatcgtcagacgatgagcttcaaatttctgcggcgtgtcaataacgccaaaaattttaccatacagctctttacttgctttgagcttgcgtatcatcttcggcacaaactcgtgcggaacgtgacaatccggacaggtcgcacggacgccgctacggttgttgtagtgcacggaatccatgtattcctgatacaccgtgttgcgcatttcgtggcagctaatgcagaactcttcggtattggctttttccatcccggtgttaaagccaccccagaagacgatgccgccaacaaaaccgatcaacagcagcgtccccagcgccagacggctgggggtacgccaccatttccacaggcgcttaatcagaccaggcttacggtcagaatttcccataataacctcttatttcccgtaacctttacttggggtaaaggtattccccacgattggcgcggtatcggcctgcggtacgtgacattgcagacagaaataacgacgcggagccacttccgcgcccactttgccgtcgctgtccataaagtgagtaggactgatacgcggcgcgccagtggtgcgatagctttcgacaccgtggcactgcaagcagcgattggtattggtcgttacctgataaccttcaacgctatgcgggatcattggcggctgattcacatagttcagcggcatccgatcctgctcttttggcatccgaatggccccttcctgtgtcccggatacttccgggctctggctaaaatcgacgccattagccgcccaaaccgcgccgcttaccaccagggccagcatcgccgtccattgacacagcgctttcttcaggtcatggcttttcatgatttcgctcccgaactccattatgtcaacttttcgctccgctactccatcgtgtagttattgtaaatacatcctcagaacagacatccacgcagcgaccgcacgtcatgcaatcgcggctggtgacctgcaccgggctttgttcatccagcaccggggcacgtagcacatgcggttccgggcaaacatgaaaacaatccatacagcggttacatttctgccgatcggtggccgcaacggtaatcacacctttgctacccagcacgccatacagcgcgccaaccggacaaatgtgcccgcaccagccgtgttcaacgaccagtagatcaaataaaaacagcgcgagaataagcagcgcgccgctgccgaagcccattaccaggctacgccccatcagagaaacggggttgatccattcccaaatgagcgtgccagttaaggcacttcccaccagaatgaccaccaacagcacgtagcgaatgtggcgagggatcgtcgcagactgattgaggtcaaagcgcctgcgtaaccagttcgctaagtcggtaatcgggttcagcgggcagacccagctgcaaaataatcgctttcccgccagggcgtagagcacggtgataatcaccgcaccggtcaacgccaccgtggcaggcagatgaccactggcaagactttgcagcgtcatcagcggatcggtcagcggaacggtgtcgaataacaggctactgctgtagttgccgtgcaagatccacacaccaaaccatggaccgctcaaaaacatccccagcacgaagaactgacaaaggcgacgtaacaccagccaacggtgactgcgccaccagccttttttctccagcgcctcgcgcccggcgtcacgtttacgatttgccattgttcccctccagccagccgttacttagcttttgccattgttcccctccagccagccgaagcggtaatggtgacctaactcccctttcgccagactcagcggtaacaccttgattgccggttgttccagcacgcatactttttcgcacttaccgcaaccggtacaggcgtcgctgtgaaccgtcggcagaaagcgggcgtgcttaccggtacgcgtgttgcgctccagctccagggtgatggcctcatcaattttcgggcattcgcgataacaaacatcgcagcgcagcccctgaaagttgagacagttttcctggtccaccagtaccgccagccccatccgcgcgtcgtcgatgctttcaatctcacgatccagcgcaccgcttgggcacactttggcgcacggaatgtcctcacacatttcgcaaggaatatcccgtgcgacaaaatatggcgtgcccgcgctcagaccagaggccagcgtcgccagttttaaggtgtcgtaagggcaagcctgaacacactgaccgcaacgcacacaggcactggcaaaggcgttctcgtttatggctccgggcgggcgcaaccgcacgccagatgcgcgtgcggtttgctgttgtaaccccagcgccacacccacggcagccagcccgcctgctgtgcgaacgacatcgcgcagaaagcggcggcgaccattttgaggtttcgcactccgggacataatggcttacaccttctccagtttgaccgcgcacttcttgaagtccgtctctttgctgagcggatcggtcgcatccagcgtcagtttgttaaccaactgtgcggcgtcgaagaacggcatgtacaccaggccctgtggcggacggttacgaccgcgcgtttcaacaatgctgatcacttcgccacggcgagaaaccactttcactttgtcgccacggcgcagatcgcgcgctttcgcatccagcgggtgaataaacaggaccgcttccgggaaggcgcggtgcagttctggtacacggcgagtcatactgccggtgtgccagtgctccagaacgcgtccggtagagagccacaggtcgtactcttcatccggtgcttccgccgccggttcgaatggcagtgcgaagatcaccgctttgccatccggtttaccgtagaacttatagccttcgcccgctttcacgtacgggtcgttaccttcgctgtaacgccactgcgtttctttaccgttcaccaccggccagcgcagaccgcgcgctttgtggtagtcatcgaacggtgccagatcgtgaccgtgaccgcgaccaaaccatgcgtactcttcgaacagccctttttgcagatagaagcccagctcgcgggattcatcgttcagctgatcttccgccagttcggataccgggaatttgctcacttccggtgtggcatacagcacttcgtacagcgttttgccacgcagttccggtttcttcgccagcagatcttccggccatacttcttcagttttgaagcggcgggagaactggactaactgccagagatcgcttttcgcttcgcccggtgcctgtacctgttgacgccagaactgagtacggcgttcggcgttaccgtaagcgccctctttctctacccacattgcggtcggcaggatcaagtcggcggccagcgcactgactgtcggatacggatcggagacgatgatgaagttgcgcggatcgcgccagcccggcatacgctcttcattgatgttcggcccggcctgcatgttgttggtacacatggtccagtaaacattcagtttgccgtctttcagcgcacggtcttgtgccaccgcgtgcagaccgattttcgccggaatggtgccgctcgggatattccacttcttctcgcagatatcacggtgtttctcgttggtcaccaccatgtccgcaggcagacggtgagcaaaggtgcccacttcacgcgcagtaccacacgcagaaggttgcccggtcagggagaacggaccgcaacccggctgggaaattttgccggtcagcaggtgcaggttgtagaccaggttgttagcccacacgccacgagtatgctggttgaagcccatcgtccagtaggagatgactttcttgttcggatcggcatacagctgcgccagttgttctaactggtctttcggcacgccggtcatttcggcagttttttccagcgtatactcggcaacgaaggctttgtaatcttcaaagctcatcggttcggaggcgtcagaacccggattcttcgctgctttttccagcggatgggtcggacgtaaaccgtagccgatgtccgtcgcccctttgcgcaggttaacgtgcttgctgaagaagtcctgatttatcgcattgttttgaatgatatagttggcgatgtagttcaggatcaccaggtcagattgcggcgtaaagatgatgccgttatccgccagctcgaagctacgatgctggtaggtagaaagcaccgccacggtgacgttctggttagagagacgacggttagtgatgcggctccagaggatcgggtgcatttccgccatgtttgcgccccacagcacaaacgcgtcagcctgctcgatgtcgtcatagcagcccatcggctcatccataccaaaggtacgcataaagccaactactgcgctcgccatacagtgacgcgcgttcgggtcgatgttgttgctacggaagcccgctttaaacagcttggacgcggcataaccttcccagatagtccactgaccagaaccgaacataccgatgctttccggccctttttctttcagggcggttttgaatttctcttccatcacatcgaaggcctgatcccaggtgattggggtaaattcgccttctttgtcatatttaccgtttttcatacgcagcagcggctgcgtcaaacggtctttaccgtacatgattttgggcaggaaatagcccttaatgcagttcaggccacggttaaccggtgcgtccgggtcgccctgacaggccaccacacgtccctgctgcgttccgaccagaacgccgcaaccagtaccgcagaaacggcacggcgctttatcccatttgatggcttcctgctgaccaacaacggcgcgggcaacgcccggcacgctgagaccggcagccgccgcagcggccgcaacggcgttagctttcataaagctacgacgactgagtttcatggtgtttcctcaccttgctcttcctgctggtgataaaccaggctcaccgccagcacgccctctacgttgcgtacactctcaatggtttggatcagcgtttcgctgtcttctgcttccaccaccacaatcaactgaccgctcggcgcgtcgctgacagcaacttcacagccgggaaaggcgttcagttgggtgctgatgtcactaattcgttcgcttttggcctgcacgaccaggctgcaaacttgccagttagtgtgcatggagatactccgcagttatggcacttaccggacagctggctgcacatgctccacatccgttgcaaagttggctattaagttgcggctggtagatcccggagagcgtcgggcgaaagataattgccattggctcacagctatcctgacagcggcggcattcaacactctgatacgccaggcacgcgtccccgatggtgaactgcaaatcccaggccctggtgtggcgcggagaaaataggctttcggggcaagcctgcgcgcaggcgtaacagaagctgcactcgttatttttgaaattaacgctcggatagccgcccgcgccgcgttgcagaatgttgttttcacaagcattaatacaggcgtcgcagcgggtgcaatgggtcagaaaatgagattcatcaccggaccagggcggacggataccgttactggctttgcgccagcgaccagtgagtatgccccgacgggatgcatcaatcttcacattgaccttccatcattaacgcgctctgaaaattgagagcgaccaaataaaccgcataattaataagccatttttatagccgctaagatattaaaggatgtgtcaaagatgcataccccgatcggggtaaaacctgtagcaggatcaaaagagtggcgggaagcgtggcaaaaacgggcttttgctcacatttcaaatggttataaatatatttatatagcgattgattcaccagagatatttctgctggtttgctctctcattagaatttaacactaaaagagcaggtaaaattgtctgaatgttctttaagttattcataaagcaaattaataaatctgatgaatatgttaaccttcagcgacatcatcggtgaaaacctataaatgaagaaggaaagcaaaaaaatgaagaccattctacctgcagtattgtttgccgctttcgctaccacttccgcctgggcggcagaaagcgtccagccactggaaaaaatcgcgccttatccacaagctgaaaaagggatgaagcgtcaggtgattcagttaaccccgcaagaagatgaatctaccctgaaagtagaactgttaatcggtcagacgctggaagtcgattgcaatttgcatcgtctcggcgggaagctggaaaacaaaacgctggaaggctggggctatgattattatgtctttgataaagtcagttccccggttagtacgatgatggcctgcccggatggcaagaaagagaagaaatttgtcaccgcgtatctgggcgatgctggaatgctgcgttacaacagcaagctgccgatcgtggtgtatacgccagacaatgtagatgtgaagtaccgcgtctggaaggcggaagagaaaattgacaacgcggtagttcgctaaactgccgtgaagtgcggcaccccgtaggtcagacaaggcggtcacgccgcatccgacatccaacgcccgagccggttgcctgatgcgacgctggcgcgtcttatcaggcctacaccgctgtgaagtgcggcaccccgtaggtcagacaaggcggtcacgccgcatccgacatccaacgcccgagccggttgcctgatgcgacgctggcgcgtcttatcaggcctacaccgctgtgaagtgctccaccccgtaggtcggataaggcggttacgccgcatccgacatctaacgcccaagccggttgcctgatgcgacgctggcgcgtcttatcaggcctacaccgctgtgaagtgctccaccccgtaggttggataaggcggttacgccgcatccgacatccaacgtccgagccggttgcctgatgcgacgctggcgcgtcttatcaggcctacaccgctgtgaagtgctccaccccgtaggtcggataaggcggttacgccgcatccgacatctaacgcccaagccggttgcctgatgcgacgctggcgcgtcttatcaggcctacaccgctgtgaagtgctccaccccgtaggttggataaggcggttacgccgcatccaacatctaacgcccgagccggttgcctgatgcgacgctggcgcgtcttatcagcatacgccacatccggcataccatgccggatgtggcgtatcattacaacgcaatatccgccacttctttttgaacgggttgcggtttcaactgcggtttcggcgtactatctgctgcctgcggcttgtcgtagttcaaccccagcacttcgctggtgtactgcaactcgcgttctgttgccgctacatcaccgttcagcttgcgtccataagacggaacgatcgctttcaacgtagcctgccattgcgggctggaaacacgatcgccaaatactttttccagcagattcaacataatcggcgcggcggtactcgcccctgggcttgcccccaggagcgcggcaatggttccttgctggtcactgacgacttcagtacccagacgcagtacgccacctttctcggcatcacgcttgataatctgcacgcgctgccccgcttgccacaaacgccagtcctcttttttcgcctgcggatagtactctttcaacgcttcaaaacgatcctcttcactcaacatcacctgactcaccagatatttcaccagatcgaaattatccagcccgacgtgcatcatcggcatcacgttagaggtggtggtggaactcattagatcccacaaactaccgtttttgaggaatttggtactgaaggtggcaaatggcccaaacagcactacgcgtttaccgtccagaacgcgggtatcgatatgcggaacgctcatcggtggtgcgccaacggatgctttaccgtaaaccttcgccagatggtgattaaccacgtccgggttttcgctaacaaggaactgtccgcccaccgggaaaccggcgtagtctttcgcttccggaatcccgctttcctgtaacagcttcagcgccgcaccgcccgcgccgataaagacaaatttggcacgaatgttctgtgcagtgccatttttcagatcggcaacggtaacggtccaggtgttatcgtcattacgctttagggcgcggacttcgctgctgagttgcaggctgaagttagatttcttctgcaaggaagcaattaactggcgggtgatctcgccgtagttcacatcggtaccaatttccgtacgcgtggctgccactttctgttgcggatcgcgcccttccatcactaacggtgcccactctttgatctgcgcgtgatcttcagagtaacgcataccgcgaaacaggctgctttgttgcaacgcggcgtaacgggcgcgcaggaaattgacgttatcctcgccccagacaaagctcatatgcggaacggtattgataaaactacgcggagtacgcagcacgccgcgctcaacctggtgcgcccagaactggcgggaaatctgaaatgcttcgttaatggcgactgctttttcaatactgatgctgccatcggcgttttgcggggtgtagttcagttccatcagtgcagaatgcccggttccggcgttattccagccgttgctactctcctgcgcgacaccctccaggcgctccaccatggtcatgctccattcaggctccagctcgcgtaaataggtccccaacgtggcgctcataatgccgccgccaatcaacagtacatcagtttcctgctcctcggacgctttcgcttttgccgccatgctaacggcattaagccccacggccatgctgaagagcatggcagtcacttttttcatcttgttaatgccttacttttagtcgctttattgcaggtgagatttgcgcggcatcaacggtaacacttaagtaacaacatttaaataatgtttataaattatattctaattttagaaacattataatttcgttgattaattatagggttattagaaatgaagggatttttagcatattgacctgacggcagcagtccgccaggtcagcgtcgtaatattatgccgtccgggcaacggcatcacggctagcggcatcgcgctcttcgcccgtcagctcgctaagttgcccattgcgcatttccagcaggcggtcggcgtggataaagtaatgatcatcatgactgatagcgaaaatagttttacccatctcctgcatcagcggcagcaacacctgataaaactcacgacggaagtgtggatcctgatccgccgcccattcatccagcaggataatatcgcgttcttctgccagcgccagcaacagcgccacgcgttttttctgccctttacttaacttcaggttaacaatacgcccgttgcttaactcaagcttatgagccattttcagctgcgccagccacttctcaaccagttgcgggttagcgggtttaccctccggccccagcagttgatcaaacagccagacatcggtaaacactgcgctaaacagtttgcgataatcttccggttgttcgccgctgacaggtttgccatccagcaagatttcgccgctttgtggctgatacaagcccgtcaacaacatcgccagcgtgctttttccgctaccgttgccgccaatcagaaacagcagctcgccacgtttgatggtgagattaatcggaccaacggaaaacgcgttatcctgataagcaaacgtcacgttacgcagctccagcgtttgccagttgggaaacgcctgcgggcgcggaaactctgctttgaaaggcgcgagcgcgaatttgttcagcttgttaaacgccacctgcgccgtcagcagcgtcggcaatgcgccaaccgcgctaagcagcggcgtacgcaggaataaaagcgtcaagctataggtcgcggcaacgttggtatcagcccaaccgaggctgttcgccatccagaacaccaggccgattgcgcccagcatcatgatgttactccagttcacggcactaagatggaaggtgtctgcgcgaataatatggtggcgatactcttgcgcatcaggaatgtagaggttgttaaacacatactcggcgcgttcccggttcagagtcagctctttgcgcccttcaagtacagtttgaaaatccgtgtacagcttgtcttcggtttcacgcagggtcgccatatgtttgtacacccgcgccaccagcacaaaaccgccccagatggtgatcgccatccagatagccgttaccagcaacattttgccgctcagcatccacagatacgccgcactaccgatagtgagaatgatcccctgcaccagttccggcagacgcacaaaagcaatggtgatattgcgcacatcgctggttaaccccgccagcaagctggcgctaccgagttgttcaatgcgctcgacgtgagtatccagaatccgcttgataaattcactacgcagtcggtaaacgaagtgatgccccaaagtggtgagcgccagttggcttccgagagtgactgccatcaacagcagcaataatcccagaaactccggcaacaccagcagactggtatccgccgtttcgataaggcgctgattgataaaagcaattaagccaatgcctaatgccgcactggcgaggcttagcgccatcacactgataaatggccagcgatactgccgccagacaagtacaagaagttccatgcagaaaacccggacaatgaattacagcccgcagtttaaacatcttcgcgcgcacagcaataataattcttatttttattcttttttacctgcctgacggaatgtcaggttgtagcggcagtcgatggtgagtggatgaaaccccgctttcaacggttgaataccgtgataaaacagccggctttcaccgccccataccaccacatcgccatgttccaacaacaaacgtttgagcggatcatttcgtttcaggccgccaaattgaaaaatcgcgggtaagcccagagaaacagaaacaattggcgcgcgcagatccggttcgtctttatcctgatgcaggctcagtttcgcgccaggagcgtagcggttgataagacaagcatctggctggaaatctggatagcccgccgccgtagccgcacgttgacataaattatgaaaactctgtggcatggcgggccacggtttatttgtttgcggatcaatggggctatagagataaccttgccgatgggtcgtccagcccagatgcccacagttggtcatcgccacgctcatggtatatcccccgggggtgaccatctggcgaaacgggctctggctggcaacgtcattaatatcgcggatcagttgctccgcagcgttaaaagcaaaacgccgtaaaattaccgcaccagccgccagtggctcttgccacggttcagcatcggcaaacagatccaacattacctctcctcattttcagcttcgcggcgcagcagttgcgctttacggctcacgccccagcggtaaccggaaagtgtgccatcaccacggaccacccgatgacagggtattatgatagccagcttgttggcggcacaggcgctggcaacggcccgtaccgctttcggtttgccgatggcgttagccagttgctgataactgacggtttcaccgcaaggtatcgtgcgcagtgcctgccagacttgttgctgaaaagcagtgccgcgaatgtccagcggtaacgtcagcggcgtatcgcgttgattgaggctggcgatcacttcacgcacatgttgctgaaacatcagatcggcaggcgcgttgtcggcagcgggaaacatctgctgcaactcgctgattagtgtcgcgtcatcatcgcccagcaatatcgcgcaaatcccccgctcgctttctgccaccaggcaacgacccagctcacaatcagccagcgcgtaacgcaccgccagattttcgccaccgtgacggaattgtttagccgtcatgcccagcgtttcgtcagctttgcgatagtaactgctgctgtcggggaatccggcgttaagaatagacgtcgtcacgctctcccctttcgccaggctttcgcgcaaacggcgagcgcgccaggcctgttgccaggctttaggcgtcattccggtagtcgctttaaacaaccgatgtagatgaaatggactcatcgccacctggtcggctaaggcttccagcgttacaggcgtttcctgttccagcagtcgacacgcgtgggtgattttatccaaccgatgttgctgggcattggctttttctggctgacaacgtttgcaggggcgaaagccagcggcgagtgcctcgctggcatttgcgtagaaggagacgttttcccgcaaagcatgtctggcgcggcaagacggacggcaaaagatgcctgtggtacgcacggcgaaaacgaattcgccgtcggcattcgggtcgcgggctaagacagattgccagcgttgatcgtcagttaagcatgtggcttttttcataatcagctccctggttaaggatagcctttaggctgcccggtcaccatcacgcaaaaaccaacaatcttgcgctttaatttttttcgctgacaaggaagcttttaaactgtggactcatccaggttttaaagctatcgccttctttggtgatcatataaaccgccagcccttcccggcgaacaacctctttagctttctccggcccgagtaccatcaagccagtatcccaggcatcggcttccagcgccgtcggagcaatcaccgtcacggataccagattgtgttcgatgggacgcccggtttgcggatcgataacatgggaaagacgtttgccgtccagttcgtaatagttacggtagctgccagaggtgctaatcccatgaccgttgatatccaccacagcctgaaccgcgttttctttatcggttggtttttgaatcgctacccgccacggcaggccttcaccgttcataccacggctgttcagcgcgccgcccacgctcaccagatagcgggaaatcccttcctgctccatcaagcgtgccaaatgatcggccgcatagccttcgccgacggtggagagatcgacatataaatccggcaggtctttttgcagatattgctgatggctctgattgatgaccgtcaggtgctgtaagccggttttggctttcatcgcatcgatctgttcctggctcggaatttgaaccggctgttgttccgggccaaagccccacagattcaccagcggcccgacggttatatccatcgcgccatcggtcttcgcgccaatgcgcaggctggtggtgacgatatcggccatcgcttcacttaccggccacgggcttaaactttggctgtcgttaaagcgcatcagcgcggaatcttttttataggtgctaagcagctgatcgtcggcgtccagttgggtctgaatcttttctttaagttcggcgctgcgtttggcgtcaatgcccgggatgctggcacgccagaaggtacccatagttttgccttcaagaacggtaacttcagtagcgtgggttttggcgggttgtggtttttgatcgcaaccaacaaagaagagcgcggcagccagcagtgccacgcgggtaaagcttatttccatacgtgattatcctcatgcgaacggtcgcaagagtacaccaaaaaactgagtttgtacgctgaaaacaatgaaaaaagggcccgcaggccctttgttcgatatcaatcgagattagaactggtaaaccagacccagagctacgatgttatcagtgttgatgccagcgtcacgagtgaactggttgtcgtccagcaggttgattttgtagtcaacgtaggtggacatgtttttgttgaagtagtaggtagcaccaacatcaacatatttcaggatatcttcgtcgtcgtagccacgacccaggtttttacctttagactgcaggtaagccagggacggacgcagaccgaagtcgaactggtactgagcaacagcttcgaagttctgtgctttgttcgcccaacccagggaacctacgcgagttgcgttgtaggtctgggtgtactgagcagccaggtagatgttgttagcgtcgtatttcagaccaccagtgtaggtttcagcacggtcgccgttaccgatgtaagcagcggtgttctgagcatcagtacgtttggagctggagatcgcaccaccgataccgaaaccttcgtaatcataagtgatagaaccgccgacgccgtcgccgttttgacgcagtgcgtcacgaccgttgttagttacgccactagtaaagccttcaccagatgggttgccgtttttaccctggtactgaacagcaaagttcaggccgtcaaccagaccgaagaagtcagtgttacggtaggtcgcgaagccgttaccacgctgctgcatgaagttgtcagaaccgtaggtgtcaccaccgaattctggcagtacgtcggtccaggaagttacgtcataaacaacgccgtagttacgaccgtagtcgaaagaacccacatcctggaatttcagacctgcgaatgccacacgggtccaggagttgttttcgttttcagcgctgttgccctggatctgatattcccactggccgtaaccggtcagctggtcagtaacctgagtttcacctttgaagccaagacgcatgtaggtctggtcgccatctacatctttgttgtcagagaaatagtgcaggccgtctactttaccgtacagatctaatttgttgccgtctttgttgtaaacttcagcagcgtttgctgcgcctgctaccagcagagctgggaccaggagggacagtactttaactttcatgttattaaccctctgttatatgcctttatttgcttttttatgccactgcatactgattaaccctcattaatcagtcggcaagtccattctccccaaaaatgcagaataatccaacacgaatatgatactaaaacttttaagatgtttcatttatcgctatagatgtttcaaaatgtaaatgcaagggaactttttaagattattgcggaatggcgaaataagcacctaacatcaagcaataataattcaaggttaaaatcaataacttattcttaagtatttgacagcactgaatgtcaaaacaaaaccttcactcgcaactagaataactcccgctatcatcattaactttatttattaccgtcattcatttctgaatgtctgtttacccctatttcaaccggatgcctcgcattcggttttttttacccttctttacacacttttcattattctgtgctaccacagaaaaactataacgcttgttaactatttcacaaataattaacatccgcataatttccagcaatctttgtttatttgcaattatttttgttgggctttttgtaggttatttgtacagcaaaatggcgcttgtacatctatttcccccaatgcaggatgataaatatcacgggagaatagagaatcatcaatcaggtaagagtctggaatttcacactgtaccctttatactgccctatcacttcgcgaagttttaacaggtcataaacacgaatgcgtcagaaagagacaacggccacgacccgctttagtctcctaccggggagcattacccgcttctttttactgttgatcattgtgttactggtgacgatgggtgtaatggtacaaagcgccgttaacgcctggctgaaagataaaagttaccagattgtcgacattacccatgctatccaaaagcgcgtcgataactggcgttacgtgacctggcagatctacgacaacattgccgcgacgacctccccctcctccggcgaaggtttacaagagacgcgcctgaaacaggatgtctactatctggagaaaccacgccgcaaaacggaagcgttaatctttggctctcacgacaacagtacgcttgagatgactcagcggatgtccacttatctggatacattgtggggcgcagaaaatgtaccgtggagcatgtattacctgaatggtcaggataacagtctggtgctgatcagtaccctaccccttaaagatctcacctccggatttaaagaaagcaccgtcagcgacattgttgatagtcgtcgtgcagagatgttgcaacaggccaacgccctcgatgaacgcgaaagcttttctaacatgcgccgcctggcctggcagaacggtcattactttacattgcgtactacctttaaccagccaggacatctggcaacggtcgtggcttttgatctgccgattaatgatttgatcccaccgggtatgccgctggacagtttccgccttgagccagacgcgacggcaacgggaaacaatgataatgagaaagaagggacggatagcgtcagtatccactttaacagtacgaagattgaaatctccagcgcactcaactctaccgatatgcgcctggtctggcaggttccttatggcaccttattgctggatacgttgcaaaacattctgctgccactgctgctgaacatcggtttgctggcgctggcgttatttggctataccacattccgccatttctccagccgcagtacagaaaacgtccccagcacggcggtcaataacgaattgcgcattttacgggcaatcaatgaagagatagtcagtctgctgccgctcggcctgctggttcacgatcaggaaagcaaccgcactgtcataagtaacaaaattgccgatcatttgctgccgcatttgaatctgcaaaacatcaccaccatggcggaacagcatcaggggattattcaggcgacgatcaataacgagctgtatgagatccgcatgttccgcagccaggtcgcgccgcgcacacaaattttcattattcgcgatcaggatcgcgaagtgctggtaaacaagaaactcaagcaggcgcagcgtctgtatgagaaaaaccagcaggggcggatgatctttatgaaaaacattggcgatgcgctgaaagaacccgcacagtccctggcggagagcgcggctaaactcaacgccccggaaagcaaacaactggcgaatcaggcagatgtgctggtgcggctggttgatgaaatacagttagcgaacatgcttgcggatgatagctggaaaagtgagacggtgctgttctccgtgcaggatttaattgatgaagttgtgcctagtgtgttgcctgccatcaagcgtaaaggtctgcaactgctgattaacaatcatctgaaagcacacgatatgcgccgcggcgatcgcgatgccttacgacgtattttgctgctactgatgcaatatgccgtgaccagtacgcaattgggaaaaatcacccttgaggttgatcaggatgagtcctccgaagaccgcctgacgttccgcattctggacacgggagaaggcgtaagtattcatgaaatggataatttgcacttcccgtttatcaaccagacccaaaacgatcgctatggcaaggcggacccgctggcattctggctgagcgatcaactggcacgtaaactgggcggtcatttaaacatcaaaacgcgggatgggcttggtacacgctactctgtgcatatcaaaatgctcgcagctgacccggaagttgaagaggaagaagagcgtttactggatgatgtctgcgtaatggtggatgttactagcgcagaaattcggaatattgtcactcgccagttagaaaattggggtgcaacctgtatcacacccgatgaaagattaattagtcaagattatgatatctttttaacggataatccgtctaatcttactgcctctggcttgcttttaagcgatgatgagtctggcgtacgggaaattgggcctggtcaattgtgcgtcaacttcaatatgagcaacgctatgcaggaagcggtcttacaattaattgaagtgcaactggcgcaggaagaggtgacagaaagccctctgggcggagatgaaaatgcgcaactccatgccagcggctattatgcgctctttgtagacacagtaccggatgatgttaagaggctgtatactgaagcagcaaccagtgactttgctgcgttagcccaaacggctcatcgtcttaaaggcgtatttgccatgctaaatctggtacccggcaagcagttatgtgaaacgctggaacatctgattcgtgagaaggatgttccaggaatagaaaaatacatcagcgacattgacagttatgtcaagagcttgctgtaacaaggtagcctattacatgaacaatatgaacgtaattattgccgatgaccatccgatagtcttgttcggtattcgcaaaagtcttgagcaaattgagtgggtgaatgttgtcggcgaatttgaagactctacagcactgatcaacaacctgccgaaactggatgcgcatgtgttgattaccgatctctccatgcctggcgataagtacggcgatggcattaccttaatcaagtacatcaagcgccatttcccaagcctgagcatcattgttctgactatgaacaacaacccggcgattcttagtgcggtattggatctggatatcgaagggatcgtgctgaaacaaggtgcaccgaccgatctgccgaaagctctcgccgcgctgcagaaagggaagaaatttaccccggaaagcgtttctcgcctgttggaaaaaatcagtgctggtggttacggtgacaagcgtctcagcccaaaagagagtgaagttctgcgcctgtttgcggaaggcttcctggtgaccgagatcgctaaaaagctgaaccgcagtattaaaaccatcagtagccagaagaaatctgcgatgatgaagctgggtgtcgagaacgatatcgccctgctgaattatctctctagtgtgaccttaagtccggcagataaagactaatcacctgtaggccagataagacgcgttagtgtcttatctggcatttgcaccgattgccggatgcggcgtaaacgccttatccggcctacgattcccattatttcaacaaattacattaaagtaggccagataagacgcgtcagcgtcgcatctggcatttgcactgaatgccggatgcggcgtaaacgccttatccgtcttagctatcccggcttttcctgaccctctcggcatataacgtcagcgtctgttttatcacatccagcgttaccggcttgctcaggcagctgtccataccggactccagacaccgctgtttctcttcagccaacgcattagcagttactccgattaccggcaacgtcagtcccaactgacgaatgcgttgcgtcaagcggtaaccatccatatttggcatgttgacgtcgctaagcacgatatcaatatgattcttgctaagtacattaagcgcatcgacgccatcattcgcggttttacattgatagcccaagcttcccaactgatctgccagcaaacgccggttaatcggatgatcatccacgaccagaatcatcatatcgtcattatcgctgaccgctttgtccgtactcggcagagcgttagcaggatcgtcgctctccatctcgatcaaataaatacgcgccaacaatgccggtagctcatgcggagcagccacactgtgtacccactcccctggcgctttctccagcggaataccaatatggcgacgacagaaggtcactaccgctctgccctgccattttttactcactacctcgtcagtgatcaacacatcttcgggagtcggttcctgcccttcgtatgttgtaacgacgatgccgctgcgctgcaaactggtttccaggaactgacagaggctcgcattgcggaccgccagccagcagcgtttaccactcaacccttccacgccttttttctgcgggtactgagcgccgtacaacggaatacgcacggtaaactggctgcccattcccggttcactatctacgctgatatcgccgtccatcatgctgatcagtttttcacaaatcgccagacccagaccggtcccctggaaattacgctgtacgcccgttccgacctggaagaagggatcaaacaagcgcaccacttctttcgccggtatccccacgccggtatcgcgaacacggatagagagataatcgccatccgcgcgaacatgcaaaactatacagccggtatcggtgaattttatggcgttactcaacaggttggagatgacctgctgtaaacgcatcgggtcgccatttaaggccactggcacatccggttcaataaagcagtacaagcctaactgcttgcgtaccaccagcggtaaatagttggcggtgatgtggttcatcacttcacgcggactaaactcacgcggttcgatcttcaactgttcgctttcaatcttgctgaaatcgagaatatcgctgataattttcaacaacaggctggaagagttgttcattgccgtcaccagccgatcgacgcctttcggtaactctttggtttgcaacagatccaggttaccgataatgccatacagcggcgttcgcagctcatgactgacggtggcaaggaacatgcttttactctggctcgcctgttccgctgcttgtgccatctcctgcaagctctcttccatcttcacgcggctagaaacatccaccagcacacaaatggccacgttttcattacgatagcggctatggacgaagctgatttgcagattggtattgttgctggtcaggacatcaacaaaattgacctgctgcccacagataatttgcgtcagtcgttggcggtcctcatgcgtaagcatattgagataggtatgcgccagttcgttacttaaaatattgacgccatcagcggtacgcaaaatgcagatacccactggcgcggaggcgacaatcttgcgattgaactgctcatgttcttccagtcgcagggcgtcgctttccgccggaatgaaaatacgtcgctcgtacatccgtgcgagagtaaacaatgcagctccggcaagcacattcagcaaaattgcgttaaggatcaacatgcgaatgcgttccagcaccttatcaaccggcacgctatacacgatgcttaggctactgggtggcagatttttcttcagcaccagctcccggaacccttccgtatagccaaaccaggagcgttcctgcatccagcgaggatcgcccttaattttactttctggtccggtaaggctaatcagggtatgaccattttcatcaagaatggtaacccccatcggcaacgtacccggtaagaaaaagttctccatccggatggtctgctcgacacccaaaagcgcctgcaaccggttcgccagataaactggcgtcaacgcgtaaaaatacccgacgccagggcgcggaccttcgctgatccagtagaggttactgccgctatcatcttgtggtgcatttcgatatttattgatgcgttcatgcaaagctttcaacgcggtatcgcgttccactggcatatcacgcagaccgaaattggccatgcagaggttatcgctgccgattaaaaatacccggtttagatcgtaagccgcagaaaaattatcgcgccagtagcgcataaaccacgccaaactctccagagaacctcgccaggtgttactcattgcggaacaatcggagtcggcaaacagcggttcaaacgcaggcacatccgcctgcgtttctcgtccacgcggggaaagcacaccgttttctgcgcttaagcgattttcggcgatgtacttcagctctttcatcacatcagaggtgcgttgaataaagcgctgagcctgatcggaactcagattaaattcctgacgaatttcgctttctcgctgatgtaacgcattaacgatgtaaaaaacggaactaaaagcaatcaacagccagagcactaacgccaatgctctgaacatgtagcggctggctttcagggttgtacgaaaagaagcaaggtatttcaaaggggcgaagctccgcctcaggtgaccgatggagtgtggttaaggtagcggtaaaagcgtgttaccgcaatgttctctcttctctggaatatgatacaccgccgagaaatcatcaccttaacctctgataatcgtcatataccggacaagactagtggatttcagcatgcattatatgaagtggatttatccacgccgcttacgcaatcaaatgatcctgatggcaatcctgatggtcattgtcccaacgcttactattggttatatcgtagaaacggaaggacgtagtgcagtcttatctgaaaaagagaaaaaactttctgccgtggtcaacctgcttaatcaggcactaggcgatcgctatgatctctacatcgacttaccacgtgaggagcgtatccgcgcattaaatgcagaacttgcccccattaccgaaaatatcactcacgccttccctggcatcggtgctggttattacaacaaaatgctggatgcgataatcacctacgcgcctagtgcgctatatcagaataatgtcggcgttaccattgccgcagatcaccctggtcgcgaagtgatgcgtacaaatacccctttagtttatagtggcaggcaggtgcgcggcgatattttgaatagtatgctccccattgagcgtaatggtgaaatcctcggctatatctgggccaatgaattaaccgaagatattcgccgccaggcctggaaaatggatgtgaggattatcattgtgctcaccgctggtttgctgataagcctgctgttgattgtccttttctcccgtcgcctgagcgccaatattgatatcatcaccgatggcctcagcactctggcacaaaatattcccactcgattaccacaattgcccggtgaaatggggcaaatcagtcagagtgttaataacctcgcccaggcactgcgtgaaacgcggacacttaacgatctgattattgaaaacgctgccgatggcgtcattgccattgaccgccagggtgatgtaaccaccatgaacccagcagcagaagttatcactggctatcaacgccatgaactggtagggcagccttactccatgttgttcgacaatactcagttctacagtccagtactggatacgctggaacatggcaccgaacatgtggcgctggagatcagttttccaggtcgtgaccgcaccattgaactcagtgtcactaccagtcgtattcataacacgcacggtgaaatgataggtgctttggtgattttctctgatttaactgcccgcaaagaaacccagcgccgcatggcgcaagcagaacgcctcgccacactgggtgagctgatggctggcgtcgcgcatgaagtacgtaatccgttaacggctattcgtggttatgtacagatcttgcgccaacaaaccagtgacccaatacatcaggaatatctgtccgtagtactcaaagaaatcgatagtattaacaaagttattcagcaattgctcgaatttagtcgtccacgccacagtcaatggcaacaagtcagcctcaatgcattggttgaagaaactctggtactggtacaaaccgccggcgtacaagcgcgggtcgacttcataagcgaactggataatgaattaagcccgattaacgccgatcgtgaactgctcaaacaggtactactgaatatcctgatcaatgccgtccaggctatcagcgcacgagggaaaattcgcattcaaacctggcaatacagcgacagtcaacaggccattagcatagaggacaacggctgtggcattgatctcagcctgcaaaaaaagatcttcgatccctttttcaccaccaaagccagtggaaccgggcttggtctggcgttaagtcaacgcatcattaatgcccatcagggtgatattcgcgtcgccagtttgccgggctacggcgcaaccttcacgcttattttaccgatcaacccgcagggaaatcagactgtatgactgctattaatcgcatccttattgtggatgatgaagataatgttcgccgtatgctgagcaccgcttttgcactacaaggattcgaaacacattgtgcgaacaacggacgcacagcattacacctgtttgccgatattcaccctgatgtggtgttgatggatatccgcatgccagagatggacggcatcaaggcactaaaggagatgcgcagccatgagacccggacacccgttattctgatgacggcctatgcggaagtggaaaccgccgtcgaagcgctacgctgcggagccttcgactatgttattaaaccgtttgatctcgatgagttgaatttaatcgttcagcgcgctttacaactccagagtatgaaaaaagagatccgtcatctgcaccaggcactgagcaccagctggcaatgggggcacattctcaccaacagcccggcgatgatggacatctgcaaagacaccgccaaaattgccctttctcaggccagcgtcttgattagcggtgaaagcggcaccgggaaagagttgattgccagagcgattcactacaatagccggcgggcaaaggggccgttcattaaagtcaactgcgcggcgctgccggaaagcttgctcgaaagtgaactgtttggtcatgaaaaaggtgcatttactggtgcacaaaccttgcgtcagggattatttgaacgagccaacgaaggtactctgctcctcgacgaaattggcgaaatgccgctggtactacaagccaaattactacgcattctacaggaacgggaatttgaacggattggcggccatcagaccataaaagttgatatccgcatcattgctgccaccaaccgcgacttgcaggcaatggtaaaagaaggcaccttccgtgaagatctcttttatcgccttaacgttattcatttaatactgccgcctctgcgcgatcgccgggaagatatttccctgttagctaatcactttttgcaaaaattcagtagtgagaatcagcgcgatattatcgacatcgatccgatggcaatgagtctgcttaccgcctggagttggccgggaaatattcgagagctttccaacgttattgaacgcgccgtcgtgatgaatagtggcccgatcattttttctgaggatcttccgccacagattcgtcagccagtctgtaatgctggcgaggtaaaaacagcccctgtcggtgagcgtaatttaaaagaggaaattaaacgcgtcgaaaaacgcatcattatggaagtgctggaacaacaagaaggaaaccgaacccgcactgctttaatgctgggcatcagtcgccgtgcattgatgtataaactccaggaatacggtatcgatccggcggatgtataacaccaaaacttgctatgcagaaatttgcacagtgcgcaattttctgcatagccgctcattctccttataaatccccatccaatttatcccttcatattcaattagttaaataactaaatccaataatctcattctggcactccccttgctattgcctgactgtacccacaacggtgtatgcaagagggataaaaaatgaaaacaaaattgatgacattacaagacgccaccggcttctttcgtgacggcatgaccatcatggtgggcggatttatggggattggcactccatcccgcctggttgaagcattactggaatctggtgttcgcgacctgacattgatagccaatgataccgcgtttgttgataccggcatcggtccgctcatcgtcaatggtcgagtccgcaaagtgattgctagtcatatcggcaccaacccggaaacaggtcggcgcatgatatctggtgagatggacgtcgttctggtgccgcaaggtacgctaatcgagcaaattcgctgtggtggagctggacttggtggttttctcaccccaacgggtgtcggcaccgtcgtagaggaaggcaaacagacactgacactcgacggtaaaacctggctgctcgaacgcccactgcgcgccgacctggcgctaattcgcgctcatcgttgcgacacacttggcaacctgacctatcaacttagcgcccgcaactttaaccccctgatagcccttgcggctgatatcacgctggtagagccagatgaactggtcgaaaccggcgagctgcaacctgaccatattgtcacccctggtgccgttatcgaccacatcatcgttagtcaggagagcaaataatggatgcgaaacaacgtattgcgcgccgtgtggcgcaagagcttcgtgatggtgacatcgttaacttagggatcggtttacccacaatggtcgccaattatttaccggagggtattcatatcactctgcaaagcgaaaacggcttcctcggtttaggcccggtcacgacagcgcatccagatctggtgaacgctggcgggcaaccgtgcggtgttttacccggtgcagccatgtttgatagcgccatgagttttgcgctaatccgtggcggtcatattgatgcctgcgtgctcggcggtttgcaagtagacgaagaagcaaacctcgcgaactgggtagtgcctgggaaaatggtgcccggtatgggtggcgcgatggatctggtgaccgggagccgcaaagtgatcatcgccatggaacattgcgccaaagatggtagtgcaaaaattttgcgccgctgcaccatgccactcactgcgcaacatgcggtgcatatgctggttactgaactggctgtctttcgttttattgacggcaaaatgtggctcaccgaaattgccgacgggtgtgatttagccaccgtgcgtgccaaaacagaagctcggtttgaagtcgccgccgatctgaatacgcaacggggtgatttatgattggtcgcataagccgttttatgacgcgttttgtcagccggtggcttcccgatccactgatctttgccatgttgctgacattgctaacattcgtgatcgcgctttggttaacaccacaaacgccgatcagcatggtgaaaatgtggggtgacggtttctggaacttgctggcgtttggtatgcagatggcgcttatcatcgttaccggtcatgcccttgccagctctgctccggtgaaaagtttgctgcgtactgccgcctccgccgcaaagacgcccgtacagggcgtcatgctggtcactttcttcggtagtgtcgcttgtgtcatcaactggggatttggtttggttgtcggcgcaatgtttgcccgtgaagtcgcccggcgagtccccggttctgattatccgttgctcattgcctgcgcctacattggttttctcacctggggtggcggcttctctggaagtatgcctctgttggctgcaacaccgggcaacccggttgagcatatcgccgggctgatcccggtgggcgatactctgttcagtggttttaacattttcatcactgtggcgttgattgtggtgatgccatttatcacccgcatgatgatgccaaaaccgtctgacgtggtgagtatcgatccaaaactactcatggaagaggctgattttcaaaagcagctaccgaaagatgccccaccatccgagcgactggaagaaagccgcattctgacgttgatcatcggcgcactcggtatcgcttaccttgcgatgtacttcagcgaacatggcttcaacatcaccatcaataccgtcaacctgatgtttatgattgcgggtctgctgctacataaaacgccaatggcttatatgcgtgctatcagcgcggcagcacgcagtactgccggtattctggtgcaattccccttctacgctgggatccaactgatgatggagcattccggtctgggcggactcattaccgaattcttcatcaatgttgcgaacaaagacaccttcccggtaatgaccttttttagttctgcactgattaacttcgccgttccgtctggcggcggtcactgggttattcagggacctttcgtgatacccgcagcccaggcgctgggcgctgatctcggtaaaagcgtaatggcgatcgcctacggcgagcaatggatgaacatggcacaaccattctgggcgctgccagcactggcaatcgccggactcggtgtccgcgacatcatgggctactgcatcactgccctgctcttctccggtgtcattttcgtcattggtttaacgctgttctgacggcacccctacaaacagaaggaatataaaatgaaaaattgtgtcatcgtcagtgcggtacgtactgctatcggtagttttaacggtagtctcgcttccaccagcgccatcgacctgggggcgacagtaattaaagccgccattgaacgtgcaaaaatcgatagtcaacacgttgatgaagtgattatgggtaacgtgttacaagccgggctggggcaaaatccggcgcgtcaggcactgttaaaaagcgggctggcagaaacggtgtgcggattcacggtcaataaagtatgtggtagcggtcttaaaagtgtggcgcttgccgcccaggccattcaggcaggtcaggcgcagagcattgtggcggggggtatggaaaatatgagtttagccccctacttactcgatgcaaaagcacgctctggttatcgtcttggagacggacaggtttatgacgtaatcctgcgcgatggcctgatgtgcgccacccatggttatcatatggggattaccgccgaaaacgtggctaaagagtacggaattacccgtgaaatgcaggatgaactggcgctacatagtcagcgtaaagcggcagccgcaattgagtccggtgcttttacagccgaaatcgtcccggtaaatgttgtcactcgaaagaaaaccttcgtcttcagtcaagacgaattcccgaaagcgaatagtacggctgaagcgttaggtgcattgcgcccggccttcgataaagcaggaacagtcaccgctgggaacgcgtctggtattaacgacggtgctgccgctctggtgattatggaagaatctgcggcgctggcagcaggccttacccccctggctcgcattaaaagttatgccagcggtggcgtgccccccgcattgatgggtatggggccagtacctgccacgcaaaaagcgttacaactggcggggctgcaactggcggatattgatctcattgaggctaatgaagcatttgctgcacagttccttgccgttgggaaaaacctgggctttgattctgagaaagtgaatgtcaacggcggggccatcgcgctcgggcatcctatcggtgccagtggtgctcgtattctggtcacactattacatgccatgcaggcacgcgataaaacgctggggctggcaacactgtgcattggcggcggtcagggaattgcgatggtgattgaacggttgaattaatcaataaaaacacccgatagcgaaagttatcgggtgttttcttgaacatcgacggcgaaggtaaccccattaatcaccagtcaaaacttttcaccagcgtcagctcgccagcattacgcatcggtacaataaatgtttcctgtttctcattgacgcttccttcatcggtgatcagcgtcagttgggcggtggttaattccgtttcgctgcgcccaccatagtagttgatatacacctgatagcgcccgtgaattggcgcgggcatggcgaaaatctcgggtccgtaccccgtcgtgacatccatatccagtgcaccactgtttttcagcacggtgttaccgtaccaggcgtgttcgccatcgggcgtaacaacgtgaaggtcgaggtcggtattgtccgtatcccagctgagaaccagccgtaaacgtgcacgaatcgttcctgtacccggcgtactgtaaaactgcattttttgtcggctttgcccatccgggctgatgacctgcacgctgttgctgccttcagtgaaaatataagggcgtgcaaaactaccatcggattcaattctctgcggcatactggcaccgttgaccaccagccggccctgctgaactttacccgccgcagcataattctttattttgccgcggatctgcgcactgatattttgatcatctgccatgttgacggagctcgccgggtaattgatgctttgactaaaactggcatcttcgccctctgccggatgccagccactgagcggtgcatcaatctcgacttcctgcacaccttcactgtgagcgacagggctaagcgccaccagtaacaacggaagaaaaatctttcgcatagcattagtccattaataattgtcgggtcagcgtttcgatatagttctcatcaagcccggtgggataaccatcaaaggccaggtgcagatactcatgggttaaatccagccgatcctgaagcgtaaagaagttacgaataaacagccgtttctgctgccgatcggtataggggaaaccactgactaaacggcaaaccgcaaacacgtctggttcgttgtaccccgtctcagcttgtaatatacgccgccactgcggcatttttttcgccagccaggctttcgctttgggtaataactggcaggtactgcgtggcgctccccagcggctaagactgttgtcgggataagcaaacgcgagtatctgatcgtaacgctctccctgccccgcctgggccgtggcttgccgccaggaaagtgtcccttcggtagcgcgactgccatgataatgaaccggatcgcctgcatagatgagatcctgcgtccaggcggtcatcgttcgcgcccccgtggtcgctgggctagcagaaacacgctgcgtggcgctgctgtcggggatggtcaggcaatcgccttcccgattggcgttttgctgtaaaaaagtgcgaatcgccacggtcatggctttcgctgcctcagggggcgtacttttcgcctcgcgatccagaactctggcaacgtactcttcacgatcgagatggctctgcaatttcagtttgcccttttcgctcagtaaggtcgtctcaccgtggctgacaaacgtaatgtggttaccattagtaaacgtcacacgatagcgcccattaagtacgccgggatttactgccgtcgtactcttttccgctgtgattttcttcagcggatagcgggcaaacagctccacctctacacattgcccactggcaacctgcgtcggcactggcaaaacccgattaagcaccgtcgcataacgggttagtaccgttttgctggtgccactgccagtaacccacagcggtgtaccatcggttaaccagccagcaaaaccaccctgacggatttcctgtttatcatcggcaaaccagctccaggttttcacccgtacccgactaccgagcatggatgcgacaccgattttcgcctcgtccagcaccacatccagtaagacttcctgagctttgttttgcgcgggtaacgtcgctaaactatcaagcaggcttttaaccgttacgctggtttctggcttcagcgtagtcagagacgctaaccacgcaggtgcctgacgctgttgccagtattgcccccacacatctgcgccaatatgcaaccgctgcggcgcaaaatagagcccacaggaacgtaccagcgcggtatcgcgcgttatgctctccccagcctgacaacaataaacctcttccggggagtttccgcgacactggtagggctgctccggttgatgggtatcctccagccaggcgtaaacatacagtttccacaaactccctaacggcgtggtgaggctgtcaggtaatgcactgactttggtcacgccactactgctcagctgatacagttgatcgtgctgcgcaccgcgcagcaccagttgtaacggcgtctcctccgcaagtgttggcagagtaaccaacgccaatagccagacgattcagcgccagttcacttatttcacctgcatcccggtccattcactccctgccgcaacactttgctgcgcaggtgcataggaacgcacataacgagcaggaggcagaacgaattgccctttttgcgagaagcgcagcaaatggcggaaagtgaccgttcccgtcagttctttcaccggcaccatataggccagttcgcccatttcatttcgcgctttttccagcaattgcccctgctgtttcgcggcgttgggtttattgaccgaaatgccccatgttgtgcgctcaacgtcggctcccggtggcagcggtacttccacctgaccgtagcgcagaactgcatcctgctcgctggtaagcgtgatttcatcgagatacagcgcatcgctgtcaatctcattgctggtcaccggttgcagaataaagctcatctcttcttcaccagggataagccgatacaactggcgttcaacggtcaccggaatgttactttgttgagccatttttgccggctcacgtcagcggacctgcacattttgcggcgataattcgtcaccaaaagagagaatgtccggcacgccctgaccaacccaacgccagtcttcgccccctccagttaacttatgtttagcccatgcgcccgcaggcgcaggcaaaacaactggaggcattgtcgccatatatttcgccagccagttcatggccagcgcgcgctcaatagtggattgctcagcggtcaaaccacttaaaatagcggccgtctgggtagcgtcgccaccgctattaagcagcacaaccgtgtgcgccagcggctgattgctgtttgccgctttatcccacgcatattgctgaacctgtggcatcaccgtggacttcaactgcgcttttttcagcaacgtcatggttaagacgtttgccaccgcatctgccagtggagactccggtgtatcgaggatcaggctatcattgatatcgcgggtgtcttcctcagagaaatcttcagttttagttccgcgccgggcgatagcttcatccaaccctttcaacaacgttttgcacggcaaattcatctcctgcgcccatgccagcaccagcgcccgatgcaataacggcatgttatctgcctgctccgcgtagctgtcgagcatatgctgccagtattccggttgttgcgttacgccgatcgcctggctggcctgccagtcggcgtaccatgcccatgccgtaaggaaggcgtcaccattgccatcttcaccccaccaggtaaagcgcgctccgggccccgccagttgcatcagccgcagacggttatcctgaatcatctgacgaatgtcgttagcggcggcactttgatgatcggcaagcgaacgccaggcgagactgagcgggatcagacggctaccggtgttgattacgccaccccacggttcatcgactaacgcatcaagattgttgcggaaaatctcctgcggcgtttcactactttgtagccggatattgctcgcctgctcgggcaacatcagcgcgttatcgccaccaccgagcatgacatttttctgctgttcaacgggccagctgttatccacaaaagacagttttgtgctaatgctgtcctgcacttgcccattttgttgcagttctgcacttaacaagccagattgctgaatattctgcgtcagcgaaatataattcgcccctttgtgcagcgtcagcgtctggcgcatctcagcgcctgcaaatttagtcaccagcgccaccggttcgttatcctgctgactgaagataaatagtcctgccgccggtttgtcgcccacgcgatacaccgttggcatactccacttcatgtagagatttttttccgaacgcagataagcacgcccctgcccgaccagcccgtcgccgttcatcccacgcgcggtgatacgccagcgggttaacgaatcaggcatcaggaacgtgaaatacgctttgccttgtttatcggttgtgagtgacggcatccatgccgcggtatccacctcttcacgccgtggacgttcaagcatttttactcgccgctcgctgcggttagttgcgccaggcgcaaccggctcgctggagagcgcctggtcgtagctgataaacgacagactggagctggtacgcacattgttacgccccagcggatagaaaaatttgccgatattcggcgcgatttctggttgcagcgcgtagatcatttcatcgaccacgcctaccgttagctgcgcagaaacaggtttacctttcagcgacgaggttaattcgacattgaccagttcaccaggctggtaatgggttttgtccgttttcacccggatatccagctggggaacggcaactttgatcccggcgttctgaaaactgtactgaccgttacgggtatacagcaccgaaaaagtgatgttaggcgcaaaggaattgctcactggaacccgggcttcatactgggtatcgtttaaacgttgtagcgttagccagtttgccggatgcgaaagcagcgactgctgttccacgcgatcgcgttccagcgtcaataatgcttcatcaattggctccggaaaggtaatcagcatcttcgcggtttcgcctggctggtacagcgttttatccgccacgatatctaccgtaccagtatgcgccgtgctgcccttaccgctgacggcatgacttaacccagcgagaattaagccgtctttatcgcgtaatgtcagattgtagttgccaggtttagcgaaattgacggtaaaggatttgccgcctgacggtagctctccgctatggctcgtgcggtcttcgagacgcaaccattcatacgtaacaggaacctgttttgaagattccagcgcggcataacggaacacaaccgactcgccgctattactgtattgtgcggcagtacttaatgagtaatgcgccagaccgcgttcaatgaggatctctttggtggtggtgacgcgatacgccgcgccgtcactggcggagacggttaacaaatagcggctcggtttatcggcggcggggagatttaacgccacatgaccgctggcgtcggacaccgtttcgctgccttccagcgacacggggaaacgtccggcataacgcaaatcgttaccgaccattgataattgctgagcgcgcaaacttaactgcacgcgggcattttttaccggctcgccatccgggtagagcagttgcagtttgccgctgaccgcttcgccagttttgaactcttttttggcgagagctaaaccaatctcgaaatgtggcttgatgtagtttgccacgcgaaaactgctgctatagacctgattgcggtaagcaagacgtaactcataacctccggctacgacattttctggcaggcggaaacttccctgcccgccattgcgcgcatccagcgtgacattgacggtttgcaacagactgccgttggcgtccagcaccgaaagcttcgccggggcgctgacgatgggggatgaatgcaacggatcgtggaactcgcggccgatcactttaacatcgacacgatcgcctgcgcgatatagcgggcgatcggtaaaaatatacaagcgggtgttgtagatttcgctttcgtagaagaagttctcggagacaaaaacgccgccttcagcatccttacccagaatgtatgaacgttctggcgatatatgttgtaactgcaaggtaccgctgtcatcggtcacaccgcgggtcatcacgccaagaccgtcagtccacaagatctctgagccgggcttcgcttcaccctgttttttacccgcggtccacaccagaagctctttgcctgacactttgctaagcgccacggtatcggaaacaaacaccaccgtcgtcgcccgatacccaccaaccatcgcctcgacgaggtacagtcccggctcttgttggccgagaggaatataaatgttacccggctgcggcgagatgaaattgctggatgcgccttccagttttaccccttgctgcggctcgaacggtttagcctgccatagtggataacggaactgtttcaccaggggatattttttcagcggggaaaactggttgttctgtacataacgggaaggtttaataatggcattgccgagctgtaattcgggtaacgcctgagtcacattctgccgtgactgagaagagaaagtacgctgcatcacgcggcgagatttgccgtaccagttatcccacagccaggttagcgtattgttcagcccgtcgcccagatattgcggttgcaccacaatgcgatgcaggtttttctgctggcgcaaaaatgccatcgggtcaggaatacgatacaggcgaacgtccacgccgccgtactcttccatctgatagcgccgataatcacgccccggcgcttccagtcgcactttcgcctcttcactgctgctaaaactgctgtcagcaagcaaaaagaatgttcccccggcaggcggcgcatagttgctggaaggaagcgaatcatcagcattagcaagccctgttcccacaagagacagggacaagcacgctgttatcgcgccagaaaatttaaacgataaatgccaatgaaattgggattggaatcgttgggtatccatcgggtgtccttccatgtcataagttgttgcagactgactgcgcgcattccgttgtcagttttcgtggcgcttccggtgtggtagatgacgtaacgccccatccagaccattaagtgctgggcatcgccctgatcgaaaaaaatcatatcgccaggcagcgcctggtttatgtcctggccaataaactggctgttgtactgaatcaaattaatcgcggtcacataggggccggttttcccgttcccctgattccagttttgcgccagttgacgctgttcaggtgttagcgtcatctctggcggcaaatactggctagataaaccgttactttttagccatttactgtcgtgaactttcagcgtctcgttcgccgcaaatcgcaccaggcccgcacaatcctgctgataccagcgtggacttggcccctggcggagctgttcttgtgcaatgcgtacaaaccaggcgcgaaacagcccggattgttcgacattcagcatttcgctatgggcaacaacacaacacagccagcaaatcagcgccagcagcccgtgcctcatagcggctgccaggttatgggtagccactgccaggcggcaccgggttccatctgggccagcttcatgacataacgcggttgttgagataaagcgtccagcttcggcattaataaagtttgtgcggcgttataaaaaaccggttcgagattcttcggcagactggtcaacgtttcgttacgcagcagtttcgctattccttgtggattgatatagagcggaacgatgccatcagtgggtattacatccaccattgccgggcgggttttattcagtgtttgcagcgcgttattaaccagcgtgtcatcgagggagaaaagcagcgttttgttttgcatcgccaggctcacacggaaaaaataatcgctcattaattgatcgggttgcgccgcctgcgctttcggatactggccgtatcgggaactcacttcgcgacgccagatttgcgcttcgccctgctgagtctggcttaccggcaaaacaccttctggcgctttgctttcgtgcgcaccaatattttgcgtaaacagtttccctggcaattgcgcctgttcggcagtgccatcaaactgaccgacaaacagcggggtttgcaatttactgtcttcataccagcacagccccgcggcaccgtctaacgccccattcagcttgtcgttttcctggctgatgtggctaagcatctcttcggcaataccgtgactatacggcaccgccacacagaagctggctccggcaggcatactgttccataccggcgtaaaatcgaaactggcatctacgctggcggattcatcatttaacgccacaaaactgtgccagccgtcgttacccatttcgaagcgtacgccagcaaaagaaggcattaaccgctggtagccaaaccccagccacctggcgctgactacgatgcgctggcgtactggcgttttttcggcagtacgctcttccaggccaaagcttgcttgccagcgttttttgccgctcaacaaatcacctgcgatcgccgtggcttcggtatcctgctgatcatctttaaacaacatatccgtgctggaaaacaccagcatcttgtcctgataagtcgcgaacatcagggcgttattgccgttatagcgcaactgataaacaggaacagtttcactatttatcttgatgctactgatttccgttttgcttaactggctgtcgctggtagcggcaaacaacaatggctccagcagtttgcttaaaccactgcgctggatcagcaccatataatgactaagatggccttgtttatcgtgccacagcgctgcctgcgcgggctgatctaagagactgctaaagagcttatctttcagcgtgagatcgtgttcatagacaatacgacgaatgctgccttcaatgcccagacgatcggcatgattctgataatagaaaacgaaatcttcgctcagaacatcgtggagaaacggaatggtgaggagatctttgggaagctggctcagagagtcgctgtcgagaaagaggtccggctcattgagatcgatttgcagattgttgtgcaccaccagcgggctcaacgttttttctggcccactgccagcatattgcaacgcccagacgccagcggaaagcagtgctattgcgccaaaacctacaagaccatagaaccgccagcctttcgccttttttcaccactcattgccacattccttgtgtatagccagccattttttacgggcacagccaaactttaccgtgccctaatacgacaaaagcccagactttgcagcctggacttttcaattcaaacaagggagatagctcccttttggcatgaagaagtaaaattattcttcttctggctcgtcgtcaacgtccacttccggagcgatttcatcgtccccttccgcggcactgccgtcgatggtatccagatcttcctcgtcaaccggttcagcaacacgttgcagacccactacgttttcatcttccgcagtacggatgaggatcacgccctgggtgttacggcccacgatgctgatttcgctaacgcgagtacgtaccagcgtaccggcatcggtgatcatcatgatctggtcgcagtcatctacctgtaccgcgccaacaactaaaccgttacgttcggtaaccttgatggagataacccctttcgtcgcacggctcttggttgggtattccgccactgcggtacgtttaccgtaaccgttttgcgttgcggtgaggattgcgccatcgccacgaggcacgatcagagagacgactttatcgccttcacctaagcgaataccgcgaacaccggtggtgttgcagcccatcgcacggacagaagactctttaaagcgcaccactttaccttcagcggagaacagcattacttcgtcttcgccgctggtcaggtcaacgccgatcagctcatcgccgtcaaccagtttgatcgccactttaccggcggtacgcagacggttgaactcggtgaggacagttttcttcacggtaccgttagcggtcgccatgaagactttcacgccttcttcaaactcggtcactggcaggatcgcagtgatacgttcgtcctgctccagcggcagcaggttgacgatcggacgaccgcgcgcgccacgagtggcttccggcaactgataaactttcatgctatagacgcgaccacggctggagaagcacagaatatggtcgtgagtgttcgccaccagcagtcggtcgataaagtcttcttctttaatacgtgcggcagatttacctttcccgccacgacgctgcgcttcgtattcagaaagcggctgatacttaacgtagccctggtgagagagcgtcacgaccacatcttcctgggtgatcagatcttccaggttgatgtctgcgctgttggcggtgatttcagtacgacgtttgtcaccgaactgttcacgaaccagctccagctcttcacggatcacttccatcagacgatcggcgctaccaagaatacgcaacagttccgcgatctgatccagcagctctttgtattcgtcgagcagtttttcgtgctcaagaccggtcagtttctgcaaacgcagatccagaatcgcctgagcttgctgttcggtcaggtagtacagaccatcacgcacgccgaactctggctccagccattccggacgcgcagcatcgtcgccagcacgttcgagcatcgcggcaacgttgcccagctgccacggattagcaaccagcgcagttttcgcttctgcaggcgtcggcgcatgacggatcagttcgatgatcgggtcgatgttcgccagcgccacggctaatgcttcaaggatatgagcacgatcgcgagctttacgcagttcgaaaatagtacgacgggtcaccacttcacggcggtgacgaacaaacgccgcgatgatgtctttcaggttcatgatcttcggctgaccatggtgcaatgccaccatgttgataccgaaagaaacctgcaactgggtctgggagtagaggttgttgagcacaacttcaccgaccgcatcgcgtttcacttcaatcacgatgcgcataccgtctttgtcagactcgtcacgcagcgcgctgatgccttccacgcgtttttcttttaccagttccgcaatcttctcgatcaggcgcgctttgtttacctgatacggaatttcgtggacgataatggtttcacgaccggttttggcgtcaacttccacttctgcgcgagcgcggatatacaccttgccgcgaccggtacggtaagcttcttcaataccgcgacgaccgttaatgattgccgccgtcgggaagtccggccccgggatgtgttccatcagcccttcaatgctgatgtcttcatcatcaatatacgccagacaaccgttgatgacttccgtcaggttgtgcggcgggatgttggttgccatacctacggcgataccggaagaaccgttcaccagcaggttaggaattttggttggcatgacgtccggaattttttccgtgccgtcatagttatcaacgaaatcgaccgtctctttttcgagatcggccatcagttcatgggcaattttcgccagacggatttccgtataacgcattgccgccgcagagtcgccgtcgatagaaccgaagttaccctgaccgtctaccagcatataacgcaggctgaatggctgcgccatgcggacgatcgtgtcatagaccgcgctgtcaccatggggatggtatttaccgattacgtcaccaacgacacgggcagattttttataggctttgttccagtcattgcctagtacgttcatggcgtaaagtacgcgacggtgtaccggcttcaggccatctcggacatctggcagcgcacggccaacaatgacgctcatcgcataatccagataggagctcttcagctcttcctcaatgttgaccggtgtaatttctctcgcaaggtcgctcatctaaccgctatccctctactgtatcccggattcaaaggtcgcaaattataacacagccgcgcagtttgaggtaaacctatacgctttattcacatccaatgcctgatatactcgtttgtcttgccaattacggagtagaagtgccaatgaatgccgaaaaaagcccggtaaaccataacgtagaccacgaagagatcgctaaatttgaagccgtcgcctcccgctggtgggatctggaaggtgagttcaaaccgctgcaccgcattaacccgctgcgtctgggctatattgccgagcgtgctggcggtttatttggcaaaaaggtgctcgatgtcggttgtggcggcggcattctggccgagagtatggcgcgcgaaggcgcgacggtgaccggtctggatatgggctttgagccattgcaggtggcaaaactgcacgcactggaaagcggcattcaggtggattacgtgcaggaaaccgtggaagagcacgcggcaaaacatgccgggcagtatgatgtggtgacctgcatggagatgctggagcacgtccccgatccgcagagtgtggtcagagcctgtgcgcaactggtgaaaccaggcggcgatgtctttttcagcacacttaaccgcaacggcaagagttggctgatggcggtggttggtgcggaatatattttgcgcatggtgcccaaaggcacgcatgatgtgaagaagtttattaaaccggcagaattgctgggctgggtggatcagaccagtttaaaagagcggcatatcactgggctgcattacaacccgatcactaatacttttaaactcggccccggcgtggatgtgaactatatgctgcacacgcagaataagtgaggttgatgtttggccgcgccaatgcctgatgcgacgcttgccgcgtcttatcaggcctacaaatgctccccgtaggccggataaggcgtttacgccgcatccggcaaccgtgccgactagacagtgattaccatttcaccgtcatgctcaaaaaccctgccgtctgggcaaaatcatcactccctttctgccacgccacgctgccgcgcagggacactcgctgactgatattgcccgtgactcccacttttatttcaccccgttgcttcaccgcatcgtcactgatagtgctgccatcctcttcaatttccgtgctatggggatcgtgataataattcagatctaatgttggtatgacatgaacagcggtacgccattcgctgtgtaaacccagccgcgtctgaatatcatcaccctggctttgactcacgcgcgcacggttagcggcggtaaaatcatcctgctgcacgccctgataaatcacctgcgcctgcggttcaatcaccacaccacgccccggtaaccactgataccccgcctccaggctggcgataatcccgctgctgtggtaatgatctgtgccatcttcttgttcggaaacatcattgctaaaccacgcgtattgcagccagctatccagccaggccccttgcttctgattaccgtgctgaaaccagctacttgtcagcccaacggcataaccgtggttctggttatcggcgcgagttccggtcatattgctgcggctgtcgccctggttatcgctgtagccaccaacaatcccaagcatccactcgccatccgtgccccagcgcccgctaaacagatcgccgctaagttgcaccgtagaagtgtcttcatgttgagccagttgccccgctgctgtgtaatgataatctccgccgataacacgtaaattcagcgtctgaccatcgccacctgcgtgatcgcgtcgctccatcataaacgcctgatttgccgcccgcaggttattaagataaccgccaactttggcattcaacaccggctggtaagcaggcgtaggttccgggtcgggtgttggatcaggatccggcgtgggatcaggatcgggagtcgggtctggatcaggtgggcttggcggcgttacttcttggcttcgcagataccagtcgttgttatcttccaccagcgtgtagtcatacgctcccatattgacgtagccgctgcctgccagactgaactgcgcattgttttgaaactgcgtgggatcagctgcgaaatcaaccactttaatgcctgtgcttgtcggctcaccaatccctgtaatggagttaaccaccacagttgtgttgccagcagtattaccgttcatcaccaattgatcgcttacgctgtcatcgccgtttaattcgctatcgagcagtagcgtaccgccgccggtataatcaccgtttaccgtcagcgtatcgccagcgacgccattttgcaggctaaccgcaccggacgtattggtcagattgccattaaccgtcacgttggaaagataagtcaggctgtcagtttcaaggttggtattaagctcacctgtcaacgtcacaccatcggtggcattcaccagcgtcccatcgccgttaaatagactggcattaagggcgacggaagtatcctgcccggtcaggcgcaaaaccgtaccatcgctgatgtcgatagtgccgctggaaatagcatcaatactctgaatatcctgatccgcgccagtaacgaacgttgccccatcaccaacccacagactgctagcataaggaaggatatcagcaacatcacctttcagggtgccttcttcgacacgtaccgcgctctgcgttgtaccgctggcggtcagctccagtgtaccagcccccgttttagtcaatgtactaccctcatcctgatgctgcccgctgctgtcagccatcagtgcgccccactgcgtgtctacccccgcatcaactgccacttcaccgtcggcgcgcatttcaatatcacgtccgtggcctgccgcatcactacgcgtgtcaacgtcggaggtaatctccatcacgctttcttgttgcttatcggtaaagataacctggcggttatagtgggtatctccaagctggctgttgtcgctcaccatcagcgtaccggaggcgatttgtgttgtgcccaaataactattattgtttgccagacttacctgcccgtcgctcgcatcgaccaccacgtagacgccatctttcccgtcgccgccgatatgcaaattgtcgccacctgcaagatctaccacatcctgactgccgataaccgttccgctgctgccactgacttcaaggccatcgttgtaacttgtgccgctctgccaggtggagaaatcagagagatcgagcacaccgccgtttaacacgatgctctgcggatcgtcctggagagcggtaagatctgccgcgtcgccttccaggctaagcaccgcaccatcatcaacgactatatcgccggttagcgccatgctctgcgcccctgccagcacgtagctgccgttttgcgcaatggtgagctgaccagcaccttcgatgatgccagcaaaactgccctgattaacagtaacgttgccaccagcatcgatatttaaagtgccattctgaaagcccgtcaatgcgtgcacaaaagtttgttgggtgctgccaacgtttagctcagcctgattctgatactgatcaatactccctatcgtcagaccgtagcagtcttgcggatcgtcctggcaatgcgtatcgccgacattcatcagggagttgctgcggcccagggtaacttcaccgttttcaatctgcatctcaccagtaaagtcattgttatctgcattaagtaccagatcgccggaacctgttttggtgattaacccggtaccagcaatagagtcaacagctccgtcattctctgtattgccaataaccagcgtttttccgtcggcaatatcaaaggtaacttcacttaagccgagatacataaagccacccgccgcagaggaaggaccatctccatagcctgctgcgctattgttctcatcgactaacacgcctccgttctggctgtagctgtcatcaacagaaatatcaataagatagggagccgtcacgctattggtatatatcgccccgccataaccttcggcagtgttatttgtaaaggcagtgttatttactatcgtataaccactaggatgcttgctgtcgctattattatcggtaacatcgattgccccgccatcgccatcactgtaacttgtacttgtatatgcctggttgttatcaaaaataacatcacttaaataaacgtcattattaatggtataaattgcgccacctttgccatcattagcgatgttattgcgaaacatggcgttagtgacacgtaaatcgacggcaccagtatcgttagtaccagaagaatagattgcgccaccatagccgcctgcgacgttaccggaaaaaataacatcagtaagattcagcgtactgttttctttagcaaatatggccccgccgttattatattctcctgtaacggtgttattggcaaacagagtcattccagtttcattttctggtaatagactaaattccgctccttgttgcaaaaatacggccccaccgctggcgttattggtcatatcgctaaaaaccagccattgcccatcagcgatactccagtcctgcgtaatgccactaaggctttgcctgctggcctgacaactcgctttgacatcatatccctggcaactatcagtgaccgccgcgacaccgttagcagagaaaagagatgcaatcatactcgggagtaaagataaatactccttgcgtagaaagataatccgcatattaatctaaccatcattttctataagacggcgtatttaatcgcattatacgatatggaatatctttcttttgtaaattgttcaacccggtgcaatggctattttgttattatttgatgaataatatcagtgcgtcataattcaagttaataaccttcagggatatcagttatatttaaactaaattaaagtcatgaataattttcttataatataaggtaaattaacaaaatggcttagcatttaacaataaccgaatagaaaacaaccatttcgccatcaacaatctcttacattcgcttatatattgaccacaactgatacatcagattatgtgatgactcgtgcttagatcaatttttgcaatcattagcaaaaagattaataagccatctatatcaatttatctaacctattatgccgttcaagaaatcgccgaacagttatttttaacaaatttttctcttcccattgactttcccggacaccttgtctgacctaaggtgcgcgaaagccactttttccttcctgagttatccacaaagttatgcacttgcaagagggtcattttcacactatcttgcagtgaatcccaaacataccccctatatatagtgttctaagcagcttcccgtactacaggtagtctgcatgaaactattgcggaaagaattccaaaaacaggtacgacatacatgaatcagaatctgctggtgacaaagcgcgacggtagcacagagcgcatcaatctcgacaaaatccatcgcgttctggattgggcggcagaaggactgcataacgttagcatttcccaggtcgagctgcgctcccacattcagttttatgacggtatcaagacctctgacatccacgaaaccattatcaaggctgccgcagacctgatctcccgtgatgcgccggattatcagtatctcgccgcgcgcctggcgatcttccacctgcgtaaaaaagcctacggccagtttgagccgcctgcgctgtacgaccacgtggtgaaaatggtcgagatgggcaaatacgataatcatctgctggaagactacacggaagaagagttcaagcagatggacacctttatcgatcacgaccgtgatatgaccttctcttatgctgccgttaagcagctggaaggcaaatatctggtacagaaccgcgtgaccggcgaaatctatgagagcgcccagttcctttatattctagttgccgcgtgcttgttcagcaactacccgcgtgaaacgcgcctgcaatatgtgaagcgtttttacgacgcggtttccacatttaaaattagcctgccgacgccaatcatgtccggcgtgcgtaccccgactcgtcagttcagctcctgcgtactgatcgagtgcggtgacagcctggattccatcaacgccacctccagcgcgattgttaaatacgtttcccagcgtgccgggatcggcatcaacgccgggcgtattcgtgcgctgggtagcccgattcgcggtggtgaagcgttccataccggctgcattccgttctacaaacatttccagacagcggtgaaatcctgctctcagggcggtgtgcgcggcggtgcggcaacgctgttctacccgatgtggcatctggaagtggaaagcctgctggtgttgaaaaacaaccgtggtgtggaaggcaaccgcgtgcgtcatatggactacggggtacaaatcaacaaactgatgtatacccgtctgctgaaaggtgaagatatcaccctgttcagcccgtccgacgtaccggggctgtacgacgcgttcttcgccgatcaggaagagtttgaacgtctgtataccaaatatgagaaagacgacagcatccgcaagcagcgtgtgaaagccgttgagctgttcagcctgatgatgcaggaacgtgcgtctaccggtcgtatctatattcagaacgttgaccactgcaatacccatagcccgtttgatccggccatcgcgccagtgcgtcagtctaacctgtgcctggagatagccctgccgaccaaaccgctgaacgacgtcaacgacgagaacggtgaaatcgcgctgtgtacgctgtctgctttcaacctgggcgcaattaataacctggatgaactggaagagctggcaattctggcggttcgtgcacttgacgcgctgctggattatcaggattacccgatcccggccgccaaacgtggagcgatgggtcgtcgtacgctgggtattggtgtgatcaacttcgcttactacctggcgaagcacggtaaacgctactccgacggcagcgccaacaacctgacgcataaaaccttcgaagccattcagtattacctgctgaaagcctctaatgagctggcgaaagagcaaggcgcgtgcccgtggtttaacgaaaccacttacgcgaaagggatcctgccgatcgatacctataagaaagatctggataccatcgctaatgagccgctgcattacgactgggaagctctgcgtgagagtatcaaaacgcacggtctgcgtaactccacgctttctgctctgatgccgtccgagacttctagccagatctctaacgccactaacggtattgaaccgccgcgcggttacgtcagcatcaaagcgagcaaagacggtattttgcgccaggtggtgccggactacgagcacctgcacgacgcctatgagctgctgtgggaaatgccgggtaacgatggttatctgcaactggtgggtatcatgcagaaatttatcgatcagagcatctctgccaacaccaactacgatccgagtcgcttcccgagtggaaaagtgccgatgcagcagttgctgaaagacctgctcaccgcctacaaattcggggtcaaaacactgtattatcagaacacccgtgacggcgctgaagacgcacaagacgatctggtgccgagtatccaggacgatggctgcgaaagcggcgcatgtaagatctgatattgagatgccggatgcggcgtaaacgccttatccggcctacggctcggtttgtaggcctgataagacgcgccagcgtcgcatcaggctccgggtgccggatgcagcgtgaacgccttatccggcctacggctcggatttgtaggcctgataagacgcgccagcgtcgcatcaggcacaggatgcggcgtaaaatgccttatccggcattaaactcccaacaggacacactcatggcatataccacctttagtcagacgaaaaatgatcagctcaaagaaccgatgttctttggtcagccggtcaacgtggctcgctacgatcagcaaaaatatgacatcttcgaaaagctgatcgaaaagcagctctctttcttctggcgtccggaagaagttgacgtctcccgcgaccgtatagattaccaggcgctgccggagcacgaaaaacacatctttatcagcaacctgaaatatcagacgctgctggattccattcagggtcgtagcccgaacgtggcgctattgccgcttatttctattccggaactggaaacctgggtcgaaacctgggcgttcagtgaaacgattcattcccgttcctatactcatatcattcgtaatatcgttaacgatccgtctgttgtgtttgacgatatcgtcaccaacgagcagatccagaaacgtgcggaagggatctccagctattacgatgagctgatcgaaatgaccagctactggcatctgctgggcgaaggtacccacaccgttaacggtaaaactgtgaccgttagcctgcgcgagctgaagaaaaaactgtatctctgcctgatgagcgttaacgcgctggaagcgattcgtttctacgtcagctttgcttgttccttcgcatttgcagaacgcgaattgatggaaggcaacgccaaaattattcgcctgattgcccgcgacgaagccctgcacctgaccggcacccagcatatgctgaatctgctgcgcagcggcgcggacgatcctgagatggcggaaattgccgaagagtgtaagcaggagtgctatgacctgtttgttcaggcagctcaacaggagaaagactgggcggattatctgttccgcgacggtagcatgattggtctgaataaagacattctctgccagtacgttgaatacatcaccaatatccgtatgcaggcagtcggtttggatctgccgttccagacgcgctccaacccgatcccgtggatcaacacttggctggtgtctgataacgtgcaggttgctccgcaggaagtggaagtcagttcttatctggtcgggcagattgacagcgaagtggacaccgacgatttgagtaacttccagctctgatggcccgcgttaccctgcgcatcactggcacacaactgctgtgccaggatgaacacccttcccttctggcggcgctggaatcccacaatgtggcggttgagtaccagtgtcgcgaaggttactgcggctcctgtcgcacacgcctggttgcaggtcaagttgactggattgccgaaccgttagcctttattcagccgggggaaattttgccctgttgttgccgggcaaaaggcgatattgaaatcgagatgtgaattggttgtagtgccagatacaacgcttatgcgtcttatctggcctacaacgattacatggcgtagtaatacgctttcacctgctcccagtccgctttggggattggctccagatatttttccagctggcggaagtcatgattaatcgctttatcgcgacgcaagcggcgacgacttttctccaggtcaagaaaaccagcttctgcattaccttctgttttcacatagatatggcgaacataacaacagccatgctgacgattaatgctatgcattttcttaaacgccagcgccactgctttcaacatggcttgccgtacttcgtcagaataagggcttactgcatgctgggcataccagtcagcaatgctgatgaaccccgccatatcttcagtcaccagcaacgctcgccattcaccctcaattttcaccgcttcaccaaaaacgatcttcggcacgatgacaccggcccgttccagttctttaattaccgcaacctcacggacaatcgttggtcggccgaacggataacgtacggaatgaaacagatgatgcgtcatgcgctttacatacagctttttgccgttgcgctcgacgcattgcaccccgctcataccattacggcgatagttaggctcttcaacccagtcgccctctgttgcccaccagtgattaaattcgtcgtactttgcactaactgccataccctatcgcctgtcatttttattaacgacaatgactataggtggttacctgaggaaaatcttaatgaaacgtgtcgtattaatgaatttcttttgccactactagcttgacaccgcttttacccttcatttgcagcgcatagattccaccagccactaccactaatagtgcgcccagcagataaaatgtgaatttaatcaggcggatacagcgatgaattttattcgacagggattaggcatcgccttacaaccagagttaacgctgaaaagcattgcaggtgaattgtgttccgttcctctcgaaccaactttctatcgacagattagcttgctggctaaagaaaagccggtagaaggcagtccactgtttttactacaaatgtgcatggaacaattagtggcgattggaaaaatttgatatgagacaggatggcgcatgaacgccatcctgcagtaacattactctttattaagaaattttactgccttatcagggaaatcagtaaacagcccatttacacccgctttgttatacagagcatcatataactgattcacatcaggagtgtattcaggcagtttatcactccgcacggtataaggatgcactaccagtttattctgctgagcatcttgcaccatgccagtgagtttgatattacccggctggcttgtctcctcaatcaacatatggtaatccggaccaataccatctgcatattccgccacctgtttcatggcacccggcttaaacatccagtcgtagttgtaattaacccagcttccatccggctgtttctgctgcgtttcattccagtcggtataggcaatcagctgtaccagattgagctccatgcccattttgggttccagctcattcttaatacgcttcagctcatcagcatcaaaacattgcaaataaactttatcgtctttaccggtgtaaccatatttcttcagcacttccagcgtttttgccgcaatatccttcccttcctgatgatggaaccacggcgctttgatttctggataaataccgatatttttcccggtagagtgatttaacccctgaacaaattcaatctcttcttcaaaggtgtgcacccggaagtcggacttacccattgggaaacgccccggataagtctgcacttttttaccgttttcaatatcgaaaccttcggtaaatttcaagctcttaatttcatccagcgtgaaatctatcgcgtagtaacgaccgtctttgcgcgcccgatccgggaaacgatcggcaacatcagtaacacgatcgaggtaatggtcatgcagaacaaccagattgtcgtctttggtcatcaccaaatcctgttccagataatccgctccctgcgcatacgccatcgcttttgctggcagcgtatgctccggcaaatatccactggcaccgcgatgggcgatgactattttttcgttgctgtccgccgccattgcactgcttcccatgactatagtgctcatcatgatcgccatgctaaggtttttcagcgtcaatttcatgccattagcctccgttgcgttcttgcagtaattgttcatggcgacgtttttcgccaatcatcacaacaatcaacaagataaccgccagaatgctgccgccaatcattaccataaagccgccatcccagccgaagaagtccacggtgtagccaacaatcgcgctcgccgccacgctaccgcccaggtaaccaaacagcccggtaaagcccgctgccgtacctgccgcttttttcggtgccagttccagcgcatgcagaccgatcagcatcacaggaccgtagatcaggaagccgataacaatcatacaaatcatatcgacggttgggttacctgccgggttcatccagtaaacgatagtcgcgatggtcaccagtgtcataaagaaaacgccggttgccccacggttgccacggaagactttatcgttcatccagccgcacagcagagtgcccggaatacctgcatattcataaaggaagtaggcccaggaggatttatctagcgcgaaatgcttaacctctttcagataagtcggactccagtcgaggatgccgtaacgcagcagataaacgaacacgttggcgatggcgatataccacagcagtttgttcggcagtacgtactgcatgaagatttgcttcgccgtcagctcctgttccgctttttcgttatagtcgtccggataatcatttttgtactcttcgatcggcggcaagccacaggattgcggggtatcgcgcatcatcgcaaaggcgaataatgccaccagaatggcgcagaaagcaggcatatagagcgccgcatgccagtcattgaaccaggccatccccagcaggaacagcagcggcggaataccaccaccgacgttgtgcgcacagttccacacactcacaatgccgccacgttctttctggctccaccagtgcaccatagtacgaccacacggcggccaccccatcccctggaaccaaccgcagaggaacaacagtacaaacatcaccgcaatgctgctcgtcgcccatggcacaaagcccataaacaacatcactgccgccgccagaatcaaacctgcgggcaggaaaacgcgcggattgctgcgatcgcttacgctacccatgatgaatttgctaaatccataagcaatgctgatcccgctaagggcaaaacctaaatcaccgcgactgaatccctgctcaaccagataaggcatagcaagcgcaaagttcttacgaaccaaatagtaagccgcatagccaaagaatatccccaggaaaatttgccagcgcaatcgacgataagtcggatcgatctccgcggcaggtaagcgcgctttgtgtggcgctggtttaaaaatactcaacattgatagcctccgtggcccgtggtcttatttatgattaacagcctgattcagtgagagaacctgccgtttcttgagttgccgcgatgttaagaaaacattcataaattaaatgtgaattgccgcacacattattaaataagatttacaaaatgttcaaaatgacgcatgaaatcacgtttcactttcgaattatgagcgaatatgcgcgaaatcaaacaattcatgtttttactatggctaaatggtaaaaaacgaacttcagagggataacaatgaaaactcgcgacagccaaagtagtgacgtgattatcattggcggcggcgcaacgggagccgggattgcccgcgactgtgccctgcgcgggctgcgcgtgattttggttgagcgccacgacatcgcaaccggtgccaccgggcgtaaccacggcctgctgcacagcggtgcgcgctatgcggtaaccgatgcggaaagcgcccgcgaatgcattagtgaaaaccagatcctgaaacgcattgcacgtcactgcgttgaaccaaccaacggcctgtttatcaccctgccggaagatgacctctccttccaggccacttttattcgcgcctgcgaagaagcagggatcagcgcagaagctatagacccgcagcaagcgcgcattatcgaacctgccgttaacccggcactgattggcgcggtgaaagttccggatggcaccgttgatccatttcgtctgaccgcagcaaacatgctggatgccaaagaacacggtgccgttatccttaccgctcatgaagtcacggggctgattcgtgaaggcgcgacggtgtgcggtgttcgtgtacgtaaccatctcaccggcgaaactcaggcccttcatgcacctgtcgtggttaatgccgctgggatctgggggcaacacattgccgaatatgccgatctgcgcattcgcatgttcccggcgaaaggaagcctgctgatcatggatcaccgcattaaccagcatgtgatcaaccgctgccgtaaaccttccgacgccgatattctggtgcctggcgataccattagcctgattggtaccacctctttacgtattgattacaacgagattgacgataatcgagtgacggcagaagaggttgatattctgctgcgtgaaggggaaaaactggcccccgtgatggcgaaaacgcgcattttgcgggcctattctggcgtgcgcccgctggttgccagcgatgacgacccgagcggacgtaacgtcagccgtggcatcgtgctgctcgaccatgctgaacgcgatggtctggacggatttatcaccatcaccggtggcaaactgatgacctatcggctgatggctgaatgggctaccgacgcggtatgccgcaaactgggcaacacgcgcccctgtacgactgccgatctggcactgcctggtagtcaagaacccgctgaagttaccttgcgtaaagtcatctccctgcctgccccgctgcgcggttctgcggtttatcgtcatggcgatcgcacgcctgcctggctgagcgaaggccgtctgcaccgtagcctggtatgtgagtgcgaagcggtaactgcgggtgaagtgcagtacgcggtagaaaatttaaacgttaatagcctgctggatttacgccgtcgtacccgtgtggggatgggcacctgccagggcgaactctgcgcctgccgcgctgccggactgctgcaacgttttaacgtcacgacgtccgcgcaatctatcgagcaactttccaccttccttaacgaacgctggaaaggcgtgcaacccatcgcctggggagatgcactgcgcgaaagcgaatttacccgctgggtttatcagggattgtgtggtctggagaaggagcagaaagatgcgctttgatactgtcattatgggcggcggcctcgccggattactctgtggcctgcaactgcaaaaacacggcctgcgctgtgccattgtcactcgtggtcaaagcgcactgcatttcagttccggaagcctggatttgctgagccatctgccagatggtcaaccggtgacagacattcacagtggactggaatctttgcgtcagcaggcaccagcccatccttactcccttctcgagccacaacgcgtgctcgatctcgcttgccaggcgcaggcattaatcgctgaaagcggtgcgcaattgcagggcagcgtagaacttgctcaccagcgggttacgccgctcggcactctgcgctctacctggctaagtagcccagaagtccccgtctggccgctgcccgcgaagaaaatatgtgtagtgggaattagcggcctgatggattttcaggcgcaccttgcggcagctagcttgcgtgaactcggccttgccgttgaaaccgcagaaatagagctgccggaactggatgtgctgcgcaataacgccaccgaatttcgcgcggtgaatatcgcccgtttccttgataatgaagaaaactggccgctgttacttgatgcgcttattcctgtcgccaatacctgcgaaatgatcctgatgcccgcctgcttcggtctggccgatgacaaactgtggcgttggttgaatgaaaaactaccttgtagtctgatgcttttgccaacgctgccgccttccgtgctgggcattcgtctgcaaaaccagttacagcgccagtttgtgcgccagggtggcgtgtggatgccgggcgatgaagtgaaaaaagtgacctgtaaaaatggcgtagtgaacgaaatctggacccgcaatcacgccgatattccgctacgtccacgtttcgcggttctcgccagcggcagtttctttagtggcggactggtagcggaacgtaacggcattcgagagccgattctcggccttgatgtgctacaaaccgccacgcggggtgaatggtataagggagatttttttgcgccgcaaccgtggcagcagttcggtgtaaccactgatgagacgctacgcccgagtcaggcagggcaaaccattgaaaacctgtttgccatcggtagcgtgctgggcggatttgatcccatcgcccagggatgcggcggcggtgtttgtgccgtcagtgctttacatgccgctcaacagattgcccaacgcgcaggaggccaacaatgaatgacaccagcttcgaaaactgcattaagtgcaccgtctgcaccaccgcctgcccggtgagccgggtgaatcccggttatccagggccaaaacaagccgggccggatggcgagcgtctgcgtttgaaagatggcgcactgtatgacgaggcgctgaaatattgcatcaactgcaaacgttgtgaagtcgcctgcccgtccgatgtgaagattggcgatattatccagcgcgcgcgggcgaaatatgacaccacgcgcccgagcctgcgtaattttgtgttgagtcataccgacctgatgggtagcgtttccacgccgttcgcaccaatcgtcaacaccgctaccagcctgaaaccggtgcggcagctgcttgatgcggcgttaaaaatcgatcatcgccgcacgctaccgaaatactccttcggcacgttccgtcgctggtatcgcagcgtggcggctcagcaagcacaatataaagaccaggtcgctttctttcacggctgcttcgttaactacaaccatccgcagttaggtaaagatttaattaaagtgctcaacgcaatgggtaccggtgtacaactgctcagcaaagaaaaatgctgcggcgtaccgctaatcgccaacggctttaccgataaagcacgcaaacaggcaattacgaatgtagagagcatccgcgaagctgtgggagtaaaaggcattccggtgattgccacctccagtacctgtacatttgccctgcgcgacgaatacccggaagtgctgaatgtcgacaacaaaggcttgcgcgatcatatcgaactggcaacccgctggctgtggcgcaagctggacgaaggcaaaacgttaccgctgaaaccgctgccgctgaaagtggtttatcacactccgtgccatatggaaaaaatgggctggacgctctacaccctggagctgttgcgtaacatcccggggcttgagttaacggtgctggattcccagtgctgcggtattgcgggtacttacggtttcaaaaaagagaactaccccaccagtcaagccatcggcgcaccactgttccgccagatagaagaaagcggcgcagatctggtggtcaccgactgcgaaacctgtaaatggcagattgagatgtccacaagtcttcgctgcgaacatccgattacgctactggcccaggcgctggcttaaactcctttctgatgcccggtaagcatgtggttaccgggcatttttgcgtacacgattccgtgcccaatgtatgcgttgcaacgcagtgaaaattcctctgaaaacgtctcgcaaaggctgaaactggcagatgtcaaaggcctgggataaccgtaatgtcgcgtcatcataaatatcaggtgacggacaaccatgaccgaaagtacaacctcctccccgcatgatgcggtatttaaaacctttatgttcacacccgaaaccgcacgggattttctcgaaatacatttaccagaaccactgcgcaagctttgcaacctgcaaaccttacgcctggaacccactagttttattgaaaaaagtttacgcgcttactacagcgatgttttgtggtccgtggaaaccagcgacggtgacggctatatctactgcgtgattgaacatcaaagctctgcagaaaagaatatggcttttcggctaatgcgctatgccactgccgccatgcagcgtcaccaggacaaaggctatgacagagtcccgctggtggtgccgttgctgttttatcatggcgaaaccagcccttacccgtacagtctcaactggctggatgagtttgacgatccgcaacttgcccggcagttgtacaccgaagcttttctgttggtggatatcaccatcgtacctgacgatgagatcatgcaacatcggcgtatagctctgctggaactgattcaaaagcatattcgcgaccgcgatttaatcggcatggtcgacaggatcaccacgcttttggttagaggcttcactaatgacagccagctacaaacactgtttaattatctgctgcaatgcggcgatacctcccgtttcacccgttttattgaggagattgccgaacgtagtccactacaaaaggagagattaatgactattgctgaacggctacggcaggaagggcatcaaattggctggcaggaaggtatgcatgaacaagccattaaaattgctttgcgcatgctggagcagggctttgaacgtgagattgtgctggcgacaacccaactcactgatgctgatattccgaactgtcattaaaaggagagattaatgactattgctgaacggctgcggcaggaaggacatcaaattggctggcaggaaggtaaattagaaggtttgcatgaacaagccattaaaattgctttgcgcatgctggaacagggctttgatcgtgaccaggtgctcgcggccacccagctaagcgaagccgatctggcagcgaataaccactaattaacacaggcccacagccgatccccatgggcctttgatatcaataactaccttttatgcgtggcccatttttgccacttttaaacatcgccagtcgttgatccagggcatcgctgtagagcatcgtgtcaacgccaacagcgacaaagttcgctccccacgccaggcattgctgcgccatatcaggagccacagccagaaaaccagccgctttacccgcagcacggatccgccgaatactggtttcaataattcgctgcacttccgggtgcccggcgttatccgggtagcccaagctcgcagaaagatccgcaggtccaataaacacgccatcaatcccttcgacgtcgaggatttcgtccaggttatccagtgccgttttactttccacctgcaccaacagacaaaggctatcgttaacttgcgccatgtaattctcaatgcgtccccagcgcgcagcccgtgccacactggccccgacaccacgctcaccgtagggaggatagcgcgtggcagacaccacctgacgtgcctgttcggcagtatcgaccatcgggatcagtagagtttgcgcgccaatatccaggacttgtttaatcagcggtttactgccttccaccggacggatcacgggttggctggcatagggcgctaccgcctgtagctgatgataaagatcctgaatggtgtttggcgcgtgctccccgtcaatcagcaaccagtcataaccagaagtggcggcaatttctgccatataggcagtcgtactgcttaaccacagaccaatttgcacttcgcccttgcgtaaacgttctttaaagggattgcttaataatgcgttcatcgtgttccttaacctatttaatgatgtgccacgtcggtctgcgcaacagtgcgatttacacgcagagtgaaaataatcaggctaccgatgaccgccaccgctgccagcgtcagtaatcccgccgcatcgctggcaaataacgtttctgctttcacgcgcaggatcggggcaataaacccgcccactgcaccaaacaggtttacaaaaccaattcccgcagccagcgccgtaccggaaagcagttgtgtcggcatcgtccagaacactggctgcacggcaataaacccgatagctgcaacacacagcgctacgatcgccattactggagaaagcagcccggacagaccaataccaatgcccgccgccagtaatgtcagcgctgcgacattacgccgttcgccggttttatcggaatagcgcggaataagccaggtcccaaacaaggccgcaacccacggaatggcggtgaccacgctcgctgtaaagcccacttttgttcccagcaatgccgcaacctgggtcggcaggaagaaaattaatccgtaaaccgccacctgaatggtcaggtagataatcgctagttgccagactcggccattacgcagcgcatcgctcagccgagaagtcactttctgttgttcttcacttgccagttgattgataagcaacgttttttcttgtttactcagaaaacgtgcctgctccggtgtgtcatcaagccaaaagaatgtgaataccccagcaccgactgccaacaatccttcaatcacaaacatccagaaccagccgggatgccccataaatccatgcatctccaacagcgcgccggaaagcggacttcccagtgttaacgccagcggtgcgcccatatagaacagccccataatgctggcgcgattacgctgcggaaaccattggctggtgagataaatcataccagggaaaaatccggcctccgcagcacgaagcagagtgcgaactatcagaaatttcgcttcagtatcggcccatgccatggctgcgctaagaaatccccacagcagtgttgtcgtaccaatccaggttctggcccccagtttgcgcatcaaaagattcgccggaacacccagaaacgcatataccacaaagaaaatgcctgctcccagcgcataagcttcattactcaacccggtatcaatctggtaggtctgtttggcaaaaccgatattgctacggtcgagaaacgccagcacatacagcgccaacataaacggaattaaacgcacacggtttttcttcaccacggcgtcaagcaaagcggtgctcataaaaagctccttagaatatgtgggcgttaccgttgtcacagcaacgcccggagtgattagtggctgtaggggcgtttcaaattgcagtcatgattgagttcgacgccaaaaccgggtttatcaagcacacttttatgaatacgaccattcaccggaaccggctcattgagcagaatcgggtcaaactgcggacgcatcgtactacaatccgggctggtcatcaggaattcgctgaatggcgtattggtgaaggtgatcaccgcatggtgagagtaaacagagctaccgtgcggcaccaccagttgccccctggatttggcgattgcggcaatttccaccagcgtggttaaaccaccgcaccagccaacatccggctgcataatgtcgataccggtttcactaagcgtacgaaaagattgcagtgtgccgtggtgctcaccgctggtgaccatcattccgactggcgcgttgcgtttcagttcgcgataactttcatactgctgtggcggcaggcactcttcgatccatttcaggttatagggcgcgcaagcgtgggccagtttggtcgcatagttcacgtcctgactcatccagcagtcgagcattaaccagaaatcctcaccgcatttttcacgcatatccgcgaccatagcggcatctttgcggatccccgcatcgccatcatgtggcccccagtgcgtcggcattttgccaccgataaagcccatctcttttgccagatccggacgcgcacctgtggcgtagaactgaatctcatcacgaacagcgccgcctaaaagtttataaaccggaagcccgaccactttgccgaacagatcccacagagccagatcgacacaagaaatcgtattcatcaccaggccaccagagccggagtaatacagggtggcactgagcatttgatcgtggatcagtttgatatcactgacacatttaccctcaatgaaacggttaagatgtttttcgacaataaaacagcccatttcaccggctgtgctaacggcgaatccggtctggccgttttctgcttcgacttcaacaaccaacgtgccaagaacgttaatgccaaaactctggcgactctgctcgtaatcgcggtatttactcatcggggtggcaatatgatcgtctatccagtgattcgccccctggtcgtgataatcaccgccgccagcgcctttttctgctgtcgcaccgccagtaaaccaggcgcgaacctgtttaatttttggtagggtcatgatgttctccattgttaactggcttgtaagtcaaagggacttttccatcccaacagacgactaatatccctggcgcaggcaatggccttgcccgccagataatcacggtattcttcattgatttgtaagcgggtaccgaccacgctgatcgcagcggtaagctcgttattggcgttaaacaccggcgcagcgacacaacggacatcggcgtaatcttcgccgttgtcatagctccagccctgacggcgaatacgcgccagttcttcgtgaagttgctgtggatgagtaatcgttgtgggtgtcgcctgctcccagaccagcccttcgataatactttgctgtaccgctgcaggttgccaggcaagcaggcatttacctattccggagcgataaaggctaaggctttttccttcatgggaacgcacgctgatagtggcactactctccactttcaaaatgtaataagcgctgccgttatcaataatccccaggtgacataacagcccggtggtatccatcagttgcgtcaaacgcggtcgagccagttcccggagatccatcttgcttaacgcatgaccggaaagctccaccagcctggtccacaaacaaaaattttcctggtgatcaaggctaagaaaacgctgacgcctgagttcattaagcagcaaataggccgtgcttttagggattcccaatgtgtcaatgatcgtcgcagcactacaggggccaatgcgggcaatcaaattgagaatatcaatagcccgtgtcagggcgggaactttgctactttccaacatactggactccagtcttagatactggaatcagtctcgttgctcagggggagtaaaattgtgaagcgcatcaaatcccgctcctcgtccagcagactggagaaattacgcacaaatttgtgaatcagcgcacggattttttcttattgagtacaacaggttggacaaattttgccggagggggaatgtgccggtgcagtaaaccggcacagagtggcggaatcagacagataaggtcatggactcaacaacctcaatccagccatgctcactggcgatatcctggccgtttaaccaacggcgcagcatattcagtgccatcattgcgcacacttcctgacggatagccaggctgtagcgcgtagtgctgaaacgcacacgcagagcgaaagtgccgtctggcgtggctagcgcaaagttgagatgctcgttctcgaaaccgctaacagccagtgccagcccggcaaaatggttggcccgccgttctgtaatccagtgcgcagtttgcgccagggtttcctcctgactaggaaccacttcacacgccagcaatggagcacctgcgcgagaaagttgcaaagccaataaaccaccggtgaattgctcgctcaacgtcaggctgaactggcggttttgcaattcgcgactgatctgcgcgggcagtccttcagtgccttcgaaaatcacgctctgtccggcaacacgtttaacatccagccacagtttttccatcgcctgttgctcgcttgccggtccggtgagtttcagttcgatgataggcatactggagcgatagcccattgttacgcccggcggcagttgtagagtgtccaggctttgtgccagatcgctttcgctacgaccaaaagtagtcaaacgcagacaaaccggcggctgcggtaaagaaaaacgctcgcgcaggcgcggcaggatttcgtgctcgaccatcaccttaaattcactcggtacgccgggagtaaagaacatcaggcaacgattaagctgcacggcaaaaccacaggcggtgcctaccgggttattgataaattcagcactggcaggcagctccgcttgtttacggttgctcggtgccattactcgtccacgttcgtggaaatagcgttccatctctttgagccaggcttcatgcagcaccaggccttcaccttttgctgtcgcagcggcgagtgcgcttaaatcatcgctggtcggtcccagcccgccgttaacgatcagcacatcggcgtgctgactacgttcgcgaagaatggtgactaagtcatcaaggttatcccccaccgtattgcggcgagataatggcaacccctgatgaaagaaaaaatcggccagccaggcagcgttagtgtcaacgatttgcccgtgtaacacttcatccccggtggataacatttccacttttaacatggttatctcctgcttttgttatcgaatcactataacgcaaagggagataaggcgtagtaagaaactgaatggcgcgacagaatgccgcgccggaagggatcagaaactggcgttaaccccaacatacgggccgtcagccacggcgttgtcgcggttaccgtctttaccgctcagattcaggtagcgataacccgcctcaatactgactggacgcataatggtgtaacgcgcgccagcattcgcttcttcataactttgaataccgctggagaggctatccggagagtagtaatactcgccaaacaaacggaagctgttgccaattttccactgcaaaccacctcctaccgctgcggcataaccttcatcgccgtaattcgggttggtgtaaacgccttttccgccaacggtcgccattaacggcccgagaggcagattcaaccccagccccacgccagcgacatcaccgtcgtcgtcgttatgtgtccagttaccgcttaacgccaggcccgtcgtttcagtcccaaaaccgacaccaatattggtgtattctttacccgcctgaccgctgatgctcattgcattgacgcttgcagaaaccaacagcattccggccagacctgctagcgcaatttttttcattatcccctttcccacaagcaattaatcaaaattcccaaagctgcgggattgtactgcctggcacagaggattcaatgagcgaaaaaaaggatctagtcacttattgtaactaaatacttcttaaataattaaatgccgaaaaaataaacacactttatcgatacacacaaaaataataataagtacagttatcatcgcaaaagagattactgtcactttcacatatttgtgagttaccgtattctcatggtttctttttatttataaggaatatccctgtgcgacaacggactattgtatgccctttgattcaaaatgatggtgcttatttgctgtgtaaaatggccgacgatcgcggcgttttccccggtcaatgggcgattagcggtggcggcgtggagcctggcgaacgaattgaagaggcactacgccgcgaaattcgcgaagaactgggagaacagctgcttttgacagaaatcacgccgtggaccttcagcgatgatattcgcaccaagacgtatgcagatggtcgcaaggaagagatttatatgatttacctgatttttgactgcgtttctgccaaccgagaagtgaaaataaacgaagagtttcaggactacgcgtgggtaaaacctgaagatctggtgcattatgatttgaatgtcgccacccgaaaaacgttacgtttgaaaggtcttctgtaacaatgatgacagccattactggctgtcagattgaaaatttagtggttaacgaattccccatccagataaactttgcctttttccacatgcatgactaaaccatccagataatcaggtttaaatgtcgcgtcacgcttatctttagcaatatatgtcaggcaatgattatgggtgaaaataacgatatttttatcaggcgctttgctttgtaagtccttaattgcactataaatctcattaccgcactgaagaagtcgtttatctaccgtcaattttttacccgcactaaaccaggtagcgctctgaatggtccggacggtattactggaataaagatcgaaatcagggatatcagcactaaaagcgttgcccagttcacgggcatcctgggtacctttaaccgtaatacctgttttatcactcaagcattgattggtactacggtcgcaacgttcagcatgacgaaacaaaacgacaaccgggtgctgctgtgccagtctggccagtgttttattgtcgatacgtggcaaaccattgctactccaggcggcatgagtacccagtccggcaattgcagcgagcgccagtaaaatgatgatatattttttactcttcaagctagagcggcaaaaagctaacacgtaaactccacctatagacaagcgcaaccagacaattaccgtgaaattgagctacatttctggcgataattcgcagttggtgtaatattaaaaatcctacgatgtcggcaaaatgcctcaaaattttgccaaatgcaaagcctaaataagaaaaaatataaaaatttcaatatttacgtctaatattagtttcttaaggttaagttaatattctatccttaaaatttcgctccaaatggcaaaatatacacaacactctttatagcaaatataagtggacaggtattcaatggcggaaggaaaagcaatgagtgaatttttgccttttagccgaccagcaatgggcgtggaggaactcgctgcagttaaagaggttctcgaatccggttggatcacaaccggtccgaagaatcaggcgcttgagcaagctttttgccagttgacgggaaatcagcatgccatcgcggtcagtagtgccaccgccggaatgcatatcacgctaatggcgttgaaaattggcaagggcgatgaagtgattacgccttccctgacctgggttagtaccctcaatatgatttccttgttgggtgcaacgccggtaatggtggatgtcgaccgcgatacgctgatggtcacgcctgaagctatcgagagtgccattacgccacgcactaaagccatcattccggtgcattatgccggtgcgccagcagatattgacgccattcgcgccattggcgaacgttacggcatcgcagttatcgaagatgctgcccatgccgtcggtacgtattacaaagggcgacatattggcgcaaaaggtaccgctatttttagttttcatgccattaaaaatattacctgtgctgaaggtggcctgattgtaactgataatgaaaaccttgcccgccagctacggatgctgaaatttcacggtctgggtgtcgatgcctatgacagacaaacctggggccgtgcaccgcaggctgaagtcttaacaccgggctataagtacaatctgaccgatattaacgccgcgattgccctgacacagttagtcaaattagagcacctcaacacccgtcggcgcgaaattgcccagcaatatcagcaagcactggcagctctcccctttcagccattaagccttcccgcctggccgcacgttcacgcctggcatctgtttattattcgtgtcgatgaacaacgttgtggtatcagtcgcgatgcgttgatggaagcgttaaaagaaagaggcattggtaccgggttacatttccgcgccgctcacacacaaaaatattatcgcgagcgttttcccacgctgagcttaccgaataccgaatggaatagcgaacgcatctgttctttgccgctgttcccggatatgactaccgccgatgccgaccatgtcatcacagcccttcagcaactcgcaggacaataagccatgtttgaaatccaccctgttaagaaagtcagcgtggttattcccgtttataacgagcaggaaagcttaccggaattaatcaggcgcaccaccacagcctgtgaaagcttggggaaagagtatgagatcctgctgattgatgacggcagtagcgataattccgcgcatatgctggtcgaagccagtcaagcggagaacagccatattgtgtctattttgcttaaccgcaattacgggcaacatagtgcgattatggcgggattcagtcacgttactggcgacttaattattacccttgatgccgatctccagaatccgccagaagaaatcccccgcctggtggcaaaagccgatgaaggttacgacgtggtagggactgtacgccagaaccgccaggacagctggtttcgtaaaaccgctagcaagatgattaaccggcttattcagcgcaccactggcaaagcgatgggtgattacggttgtatgctgcgcgcctatcgccgtcatattgtcgatgcgatgttgcactgccatgaacgcagcacctttatcccgattctggcgaatatcttcgcccgccgtgccattgaaattccagtacatcatgccgagcgtgagtttggtgaatccaaatacagttttatgcgcctgattaatttgatgtacgacctggtgacctgccttaccacaacgccgctacgtatgctgagtctgctcggcagcattattgcgattggaggttttagcattgcggtgctgctggtgattttacgcctgaccttcggaccacaatgggcggcagaaggcgtctttatgctatttgccgtgctgtttacttttattggcgctcagtttatcggcatgggattactcggtgaatatatcggcaggatctacaccgatgtccgcgcccgcccccgctattttgttcagcaagttatccgtccatccagcaaggaaaatgaataatgaaaaccgtcgtttttgcctaccacgatatgggatgcctcggtattgaagccctgctggctgccggttacgaaattagcgccatttttacccatactgataatcccggtgaaaaagccttttatggtagcgtggctcgtctggcggcggaaagaggcattccggtttatgcgccggataacgttaatcatccgctgtgggtggaacgcattgcccaactgagcccagatgtgattttctctttttattatcgccatcttatttacgacgaaattttgcagctcgctcccgcaggtgcatttaatctgcatggtagcctgttaccaaaatatcgtggtcgcgcgccgctgaactgggtgctggtcaacggtgaaacggaaactggcgttacattgcaccgaatggtgaaacgtgccgatgccggggccattgtggcgcaactgcgcattgccattgcgccagacgatatcgctattacgctgcatcataaattgtgccatgccgcgcgccagctactggaacagacattacccgccattaaacacggtaatattctggaaatcgcccagcgcgaaaacgaagccacctgttttggtcgcagaacgccggatgacagtttccttgaatggcataaaccggcatccgtactgcacaacatggtacgtgccgttgccgatccgtggccgggtgccttcagctatgttggcaatcagaaattcaccgtctggagcagccgtgttcatcctcatgccagcaaagcacagccggggagcgtgatttctgttgcgccactgctgattgcctgtggcgatggcgcgctggaaatcgtcaccggacaggcgggcgacggcattactatgcagggcagccaattagcgcagacgctgggcctggtgcaaggtagtcgcttgaatagccagcctgcctgcaccgcccgacgccgtacccgggtactcatcctcggggtgaatggctttattggcaaccatctgacagaacgcctgctgcgcgaagatcattatgaagtttacggtctggatattggcagcgatgcgataagccgttttctgaatcatccgcattttcactttgttgaaggcgatatcagtattcattccgaatggattgagtatcatgtcaaaaaatgtgatgtcgtcttgccgctggtggcgatagccacgccgattgaatatacccgcaacccgctgcgcgtatttgaactcgattttgaagagaatctgcgcattatccgctactgcgtgaagtaccgtaagcgaatcatcttcccgagtactagtgaagtttatgggatgtgtagcgataaatacttcgatgaggaccattctaatttaatcgtcggcccggtgaataaaccacgctggatttatagcgtaagtaaacaattacttgatcgggtgatctgggcctatggcgaaaaagagggtttacagttcaccctcttccgcccgtttaactggatgggaccacgactggataaccttaatgcagcgcgaattggcagctcccgcgctattacgcaactcattctcaatctggtagaaggtagtccgattaagctgattgatggcggaaaacaaaaacgctgctttactgatattcgcgatggtatcgaggcgttataccgcattatcgaaaatgcgggaaatcgctgcgacggtgaaattatcaacattggcaatcctgagaacgaagcgagcattgaggaactgggcgagatgctgctggcgagcttcgaaaaacatccgctgcgccatcatttcccaccgtttgcgggctttcgcgttgtcgaaagtagcagctactacggcaaaggatatcaggacgtagagcatcgtaaaccgagcatccgcaatgcccaccgctgcctggactgggagccgaaaattgatatgcaggaaaccatcgacgaaacgctggatttcttcctgcgcaccgttgatcttacggataaaccaagttgacctaagatcttacggataaaccatcatgaccaaagtaggcttacgcattgatgtcgatacctttcgtggcacccgtgaaggcgtgccgcgtctgctggaaatcttgagtaagcataatattcaggccagcatttttttcagcgtcggcccggacaatatgggccgccatctctggcgactggtgaagccacagtttttgtggaagatgctgcgcagtaacgcggcaagcctttatggctgggatattttactggcaggtacggcctggccaggtaaagagattggtcatgccaatgccgatatcattcgtgaagcggctaaacatcacgaagtcggcctgcacgcctgggatcaccatgcctggcaagcccgtagcggtaactgggatcggcaaacaatgatcgacgatattgcacgcggtcttcgcactctggaagagattatcggtcaaccggtaacctgttctgccgctgcgggctggcgtgccgaccagaaggtgatcgaagcaaaagaagcgttccatttgcgctacaacagcgattgtcgtggggccatgccgttccgtccattgctcgaaagtggaaaccctggcactgcgcaaattccggtgaccttacccacctgggatgaagtgattggtcgggatgtgaaagcagaagattttaacggttggttactcaaccgcatcctgcgagataaaggcacgccggtttataccattcatgcagaagttgaaggctgcgcttatcagcataattttgtggatctcctcaaacgcgcagctcaggaaggcgtgacattttgccctttaagcgaactgttaagtgagacgttgccgctcggacaagttgttcgcggaaatattgccggacgtgaaggctggctgggttgccaacaaattgcgggtagtcgctgatgaaaagcgtacgttaccttatcggcctcttcgcgtttattgcctgctattacctgttaccgatcagcacgcgtctgctctggcaacccgatgaaacgcgttatgcggaaatcagtcgagaaatgctggcatccggcgactggattgtgccccatctgttagggctacgttatttcgaaaaacccattgccggatactggattaacagcattgggcaatggctatttggcgcgaataactttggtgtgcgggcaggcgttatctttgcgaccctgttaactgccgcgctggtgacctggtttactctgcgcttatggcgcgataaacgtctggctctactcgccacagtaatttatctcagtttgtttattgtctatgccatcggcacttatgccgtgctcgatccgtttattgcattctggctggtggcgggaatgtgcagcttctggctggcaatgcaggcacagacgtggaaaggcaaaagcgcaggatttttactgctgggaatcacctgcggcatgggggtgatgaccaaaggttttctcgcccttgccgtgccggtattaagcgtgctgccatgggtagcgacgcaaaaacgctggaaagatctctttatttacggctggctggcggttatcagttgcgtactgacggttctcccttggggactggcgatagcgcagcgggagcctaacttctggcactattttttctgggttgagcatattcaacgctttgcactggatgatgcccaacatagagctccgttctggtactacgtgccggtcatcattgccggtagcctgccgtggctgggattactccccggtgcactgtacacaggctggaaaaaccgcaagcattccgcaaccgtctatttgttgagctggacgataatgccgctgctgtttttctccgtcgctaaaggtaaattgcccacctatattctttcctgctttgcatctctggcaatgctgatggcgcattacgctttgctggcagcaaaaaataatcctctggcgctgcggattaatggctggattaacatcgcttttggcgtcactggcattattgccacatttgtggtctccccgtggggaccaatgaacacgccggtgtggcaaaccttcgagagctataaagtcttttgtgcctggagcatttttagcctatgggcatttttcggctggtacaccttaacaaacgtcgaaaagacctggccttttgccgcgctttgcccgctggggctggcgttgctggtaggatttagtattcctgacagagttatggaaggaaaacatccgcaattttttgtcgagatgacacaagaaagtcttcagccaagccgctatattcttactgatagcgtcggtgttgccgcaggtctggcatggagcctgcaacgcgatgacatcatcatgtatcgccagacaggtgagttgaaatacggccttaattatccggatgcgaaagggagatttgtcagcggtgatgagttcgcaaactggcttaatcaacatcgtcaggaggggattattactctcgtgcttagcgttgaccgcgatgaagatatcaacagtctcgccattccgcccgcagatgccatcgatcgtcaggagcgtctggtgctgattcagtatcgtcccaaatgatctggctaacattagtctttgccagcttgcttagcgttgccgggcagttgtgtcagaaacaggcaacctgctttgtggcgataaacaaacggcgcaaacatatcgtgctgtggctgggactggcgctggcttgtcttggtcttgccatggtgctctggctgctggtcttgcagaacgtaccggtaggcattgcttacccgatgttaagtctgaattttgtctgggtgacgctggctgcagtaaaactgtggcacgaaccggtaagcccgcgtcactggtgtggggtggcgttcattattggcggcattgtgaacctcgggagtacggtgtaatgggcctgatgtggggattattcagcgtcattattgccagtgttgcgcaattaagcctgggttttgcggcgagtcatctgccgccgatgacgcacttatgggattttatcgcggctctgttagcttttggcctggatgcccggatactgttactcgggctgctgggttatctgctttccgttttttgttggtataaaacgcttcataaacttgcgctaagcaaagcctatgccttgctcagtatgagttatgtgctggtatggattgctagtatggtacttcccggctgggaagggacttttagcctgaaagcactactgggagtagcctgtattatgagcgggttgatgctgattttcctgcccacgacaaaacaacgttactgagttttccctgccactttacactgccgttcccactcatcggggctataactgcttgcgctgaggactttcaccgtatgcagcttttcacgattaatacaataaagcgcattctgcaaagggctgagtaaatcccccactttcacggcgaagtcactcttcacttcggcgatcatttttatcgcgccgccagcatcgcagagcataagtacatgtctgttatcttgtttattgcagcagctttttttgaccagccattccattgcattatcctgtttgctaagagttttcacatcaatttacagattaacagataaactctttatcaacggcaatggaatggcagaaatgagaagtgaaacggagggttaattattgctgacgttgcacccactcttttagcgcctgacgactaattttaataccgccgtttttcagctccggcggcagagttagccagcgcaccggttgttgaaaacgggccagcttatctttcacccattcactaagatcaacgctctcgtggtcatactccatcaccgccaccggtcgatgaccaaactccttgtcggcaacggggacgataaacacctgcaaaaccgcaggatgtgcagcaattacgcgctcgacttcttccggctgaataccctctccgccactgaagaatagattgtctaaacgtccgacaatggtcagcttgccattatgcatctcaccgcgatcgcgcgtagcgtaccagccttcgtcattaaccagactaaccagttgcccgttacgccagtaaccttctgccatactggcagcccgcagccacacttcattattaacgattttcacttcccgacccggcagcgggctaccaacgtctgccaggccgtcggcttctttcgcacacaccgtggaggcaaactcggtcagaccatagccgcaaaagcaacgaatcccctgctcgcgcgcctgttccgtcaactcgaccgggatagccgcgccgccaagtaacaccgctttcagggaaacggaactacggttaaccagcaaacgccagagttgtgttggcaccagactagcgtgagtacagcctgccagcatttgctccaatggctgtttatcacgtaccgtcatccgcgcaccagcgtataaccagcgccacataattccctgaccggagacgtgaaacagcggtaaagagagcaaccaatcatcgtgatcgccaaacggaatcaggcttaacacaccttgcgcactggcaagatgggcctgataagtatggacagcggctttcggcaaaccggtagaaccgctggtcaacgtcatactgcacagacgcgtcggctgccacgtagcggcatgtgcgccttcaaccagctgaatgtgcaggctcgttaatgccggaaacgtgttttccccatccggcaccagagcaaattgcagcgtcagattgggcagcaattcttcaagcaacggttgcggcagctgagggttcacgggcaacacccgcgccccgcattgcagtaacgccagccaggcgagcagcgtttgcggcgtattccacgcccgcaacatcacgccgctgccctcaaccaccccctgcaccgcaaatccggaggctaattcatcgacgcgagcacaaagctcgcgccagttgagttgctcgtcattaagacgtaaggcgatggtttctccccgcacttgccgccagtgacgccacggccagtcagagaagatcataacaaccgctccagtgcatcaacttccacgacaggcagcgtgctacccggccagcgacgtacctgctgcgcctgcatcagatccagcgtgtccagccctggaatggtgtccggcgttaaccaggcggcaatccgcgccagttgcgttaagcctaagctgctttcaatggaagaactgatcaccgccgtcagccccagcgcgtgcgccgcctgtacctgctcgcgtactttttccagactgcccgtgagcgtgggtttgataactaccgcgcgcacgccctcttcagccacaaaggcaaaatccggctcgcgcaggctttcatcccaggcaatggcaatgccggtttcacgggcaaacgctcggctatcatcgcgggttttgcacggctcttcgagaaacgcgatgcggtcgcgataatccgggttaacgtatttggcaaactgctgacctttcagcggtgtccaggcgcgatttgcgtcaagacgcaaatgcagatccggaattgcctccagcaacagattcaccaccatgccgtcgcgcaccgcttcgtacaatcccactttgaccttcgccactttctcgcctggcatatctgcaagtttgaggatcagatcgtccggatcgccattacacagcggtgccgcacggtagttggctgcttgcggcaacgtatctgtcagttctgccaatgcacagcttacgccaaaggccacggaaggcatctgcggtagctcgcaatcgcctgccagccagttatttacccaggcaagcagcacactttgcgcctcttcccaggtttcctgactgaagcccggcagtggggagatctccccccacccttcgcgctcgccttcacgcaggcaaacatacagcccgtcgcgggtttttaaccgcctgtcgcgcagaaccacccccgcgtccatggggatctgccagcggtatacctgcgcgctacgcattacggattccgtttgaatttgctgaagtcaggctgacgtttctggttgaaggcgttgcgaccttcctgaccttcttccgtcatgtagaacagcatggtggcgttgcccgccagctcctgcagccccgcctgcccgtcacagtcggcgttcagtgcagctttcaggcagcgcagcgccatcgggctgttttgcagcatttcgcggcaccaacggacggtttctttttccagatccgccagcggtaccacggtgttcacaaggcccatatccagcgcctgttttgcgtcgtactgacggcacaggaaccagatttcacgcgcttttttctgcccgacgatgcgagccatgtaggaagcgccccagccgccgtcgaaggaaccgactttcgggccagtctgaccgaagatggcattatctgccgcgatagtcaggtcgcacatcatgtgcagaacgtgaccgccgccgatggagtagccagccaccatcgcgacaaccggtttcggacaggtacggatctgacgctggaagtccagcacattcaggtgatgtacgccggaatcatctttatagccgccgtaatcaccacgcactttctggtcaccaccggagcagaacgctttatcgcctgcaccagtcagaatgatcacgccgatgttgtcgtcataacgcgcatctgccagcgcctggatcatctcttttaccgtcagaggacggaaggcattgcgcacctgcggacgattaatggtgatttttgcgataccgtcggtggatttttcataacgaatgtcctcgaaaccttcggagcagtcgtgccattcaaccggtgcgtaaagcattgcttcatcaggataaatcatattgtgtcctttagtcagaaacgcaagatctgcgccagacttgcgattacgccagcgggattttcccgatgcgcgttatgtccggcgcgaggaatgacatggcagtcggcagccagttccgccgccagggcgcggaatttgctgtcacgttcaccacataaataataaaacgcaaatgtgcgggcgctaaggttagcacgtaaatcaggctggacggcgagagaagtcgcctccagcatggcggcaagcgttgcgccattattgttgctgcgcagcgccaccagctcccggcgttgatcgtcattgagactggcaaaaacaggctgttgataccagtcggcaaataccgccgttaacggttctgtgagaaaacgctgcacccattggcgatcggaacgctgacgttccgcacgttgttcagcattttgcagccccggatgcccgccttcgacaataaccccacaaagccccgccagcccctggcaagccgccatcatcgccacccgtccaccaaggctgtaccccaccagccagaagtcaaggatgttgtaactaaccaaggttttacgcagtaagtcggtgacatcatcaaatccatcgacgctaatcgccgcgctaccaccgtgacctgggagatcaacatacaaccgactgtagtcggcaaacgcctcgcccacttcttgccattcgtggcaatcgccggaaaaaccgtgcaaaaacaccagccagggtaaacctggttttccgtgttttgcctgcgcgtgcaggatcataaatggcttacctgcgccagaagttgctggagcgtttgcgcaccatcggtgtcgttaaccaccatttcaatcaccgtggtggttggcgtgcgccaggcgtcggcaaatgccgtttcaagttcctgccagttttgcggacgatgatatttcagctcgaacatcgcggcggcgtgctcaaaatggacgttttgcggcatcagatagaaacgctcacgctcgctttgcggcgttggcaacaggctgaaaatttgcccgccgttgttgttcaccacaattaataccagcggcgcagaaacctgacgcaataacgccagcgcgttgagatcgtaaagtgcggagagatcgcccacaatcgccagcgtcggtttgccgcttgcccgctgaacgccggcggcggtgctaagcagcccgtcgataccgctggccccacggttgctgtacaccgggtaacctgccggaagttggctaagcgcatcaatcagacgtaccaccaggctgttaccaacaaacaattgcccctgttcaggcagatagtcgcagatgcgatgcgccagttgcgcttcgccaaacgcatcacggcgggcaataaccgcctgcattgcctgttccgccaggcgcgggatttcaacgcaccagggctggcgtttttctgccggatgcagctccagccagtcggcaatattggcaattaagcgacgtccgcgatggtgtgccggatcaagtcgcccttcaatgtcatcaacaatccagtactcttctggttcacagcttgcctgccattgcaggagccgtttccccgtcaggctgcttcccagttgcaccacaatttgcgcctgctgcagctcgctggtcgctttggcattgcctaaccaaagatcggcacacggcagcggctgcccggtttgactcagcacatcgccaatcagcggccagccaagagtttgcgcccacagggcaacttttttgccctcttccgcactcatgcgcccggcaaccaccacgccgcgcttttgtcgccagaagaaccagtcgcgctgtttttcactttccagacgaggcgcttcacgcagccacggtttgtcttcctgccaccagtcacccagacgctgttgccagctaagcccggtatcgtccatttcgccatacagcggttcagcaaacgggcagttgatatggactccccccgcatgaagcgtaccgagagcgtggtcgatggtagaaaccagccaacgtgcggggatatcctgggtcgggcgcggcaaactaatactgtgcgtggggtgagaggcgaacattcccggctggcgaattgcctgattcgcgccgcagtcaattagctccggcgggcgatcggcggttaagagaatcagtttttctccggttaacccggcttcaatcagtgccggatagagatttgccaccgccgtgccggaggtcacaatcaccgccaccggctgcttgctgactttcgccagccccagcgccagatgccccaacccacgctcatcgaaatgggtgtggtgaatgaatgcggaattctccgccgccgctaacgttaacggtgtagaacggctgcctggggcgatacagatgtgtctgacgccgtgacgcgttaatgcttccagaatgaccgccgcccagcgtcggttaaatgcgcttacactcatgagtttgtccggtatcaatattgcggctaagtataaggagctacaaaaatagattattgatatgaatcggtaatgatgcgactcattattattccatttgtaataaagtacgcagccctgccgctttgttgtcgatttcctgccactcttgctcggggtcggaaccacggacaatgcccgcgccagcatataatcgcacgacattgccgctaatttttgcactgcgcagggaaacgcagaattcgctttgttgtaaactgagatagcccgcagaaccggcgtaccattctcgggtgaacggttcgtgacgggcgataaactgtcgcgccagatcgcgcggtaagccagcaactgctgccgttggctgcaactgatgtaaacagatcacatcatccgctttgttgagactagtccagatacagcggcgaagatgctgcactttacgcagacgcagtacctgcggcggtaaaacatccagcgtctgggtatcggcctgtaatcgttgacagatatcttccaccaccagcatgttctcgcgctggtttttatcatccgccatcagccactctcctaactgctgcgcctgcttatcatcaggattatttgctactgttcccgccagcgcttcagtacgcagcgctttgtcacgccgccgccataaccgttccggactagagccaagaaaagcattttcgccatcaaaggccatgtaaaaatggtagcaattcagattcagtcgacgactggcagccatcatcgccgccgcgttgaccggacttgcgaaatgcaggtcagttgcccgagcgagcaccactttgtcgagctcaccttcggcgatggttttcgttgccagttcgattaattgcgtccagcccgttttgtccggccagtgttgttctcgcgtggtggttaaatgtaacccaggcaagggcttgatactcaccagtgtggcgataaattcttttgcctgaatcgcatcgtgctgaagggagctttcgctgaatagcgtcagccgcagcgtggctttaccgccacagcgtcgccattccaggcggggtaaaagtaaattgccctggctcgggtcaaaagcattcagcccccaaatgcgtaagtcggcgtgttccgggtgctggcgaagaaaacgttgtgcctggtccaagctcgtaaaacgggtaatcgcgcccaggacgacagcttcttcatcaccattacgttgttgccagtagaattgcgggtatgtttgctgactggccagccagctcaaggcatcaaaagcgtctttgagagggaaaggaatatcgataacccgaatgccgggtgtcgccggaatctcttggctcaaatggcgcagtagattttccagcgccgtagtaagactttgcacgcggacctctccctgttaaaagcctcacattatacggggtactacaaaaaaaatgcagtaccccggtgtagggaggttttaacggcgtgccagcaacagtcctagtaccagcccaacggccgcgcccacaccaattccttgccagggtttttcgtggacgtagtcatcagcacgataaactgcctgcttcgcccgatagtaataactgtcactagcctggctaacccgttttttcacatcatccagcgctttttctgcacgcgctttcagctcaacatatttctgatcggcgggatcgccagaggagcggagcacctcttccagtgtttcactaagcagcgtcaggtcgtcatcgatacgtgtatcaccaaactgattagacattctcgttctccatttgcgtaaaacctgtcactaactatagacaagggttgttgattacgcctgaattacctcgcgtgccatcccaatgtgtgggataccatcttcttcatagacctccgtcacagggataaaaccgaaactctggtagaagttttgcagatgcgcctgcgccccgaggtaaacaggcttatcaggccagtgatgcgtacatgtttcgagtgttttactcatcagctgctgccccactttttcgccacgcaacgcttcactgacaatcacccgacctataacgaccggctcaagatcatcatcacttttcagaatcctcgcatacgccaccagttcatcatttttccaaccgagaatatggcgattatcccccgtcaaatcatcaccatcgatatcctgataagggcaattctgctcgacaacaaacaccgcgcaacgcagttgtaataaggcataaagctgggaaacgcttaattcagagtgatgcagatcttgccattcaatcataatgctctccttttagatgtatgccttatactagccggaatattttttgaaacgtgatgaactcatggaattaatttttttaggtactagtgccggtgtgccaacccgcacgcgcaatgtcacggcaatattgcttaacctgcaacatccgacccagagcggactttggttgtttgactgcggtgaaggcacccagcatcagctactgcataccgcctttaaccctggaaaactggacaagatttttatcagtcaccttcatggcgatcatctttttggtttacccggcttgctgtgcagtcgttctatgagtggcattatccaacccttaacgatttatggtccgcaaggtatccgtgaatttgtggaaaccgcgctgcggattagcggcagttggaccgattatccgctggaaattgtcgaaattggcgctggcgaaattctcgatgatggcctgcgcaaagtaaccgcttatccgctggaacacccactggaatgttatggctatcgtattgaagaacatgataaaccgggtgcattaaatgcccaggcattaaaagctgctggcgtgccgcctggcccactgtttcaggaattaaaagcgggcaaaacaatcacgctggaagatggaaggcagattaacggcgcagattacttagctgctccagtgccaggtaaagcgctcgctattttcggcgataccggcccctgcgatgccgcacttgacctggctaaaggtgtcgatgtcatggtgcacgaagcgacgctggatataaccatggaagccaaagccaatagtcgcggccatagctctacacgccaggctgcgacactagcccgtgaggctggagtcggcaagctaatcattacccacgtcagcagccgctatgatgacaaaggttgtcagcacctgttacgtgaatgcaggagtattttcccggcgactgaactggcgaatgatttcaccgtgtttaacgtttaactctgcttattattaaaaacagggcgaaacttgccctgttatcgcaacccgcgctacatatatccacccacacaggcatattgagcgatttttgatatttattcatctccttacgcactatattcagagcaataagttgcctcttttcatcttgattcagcacaacctttgcaactaaaaggagcccatgatggttacagttgtcagcaattattgtcaattatctcaaacgcaactcagtcagacatttgcagaaaaatttactgtgaccgaggaattactgcagtctttaaaaaaaacagcgttatccggagatgaagaaagcattgagttactgcataatattgcgttaggttatgataaatttgggaaagaagctgaagatattctttaccatattgttagaaccccaacaaatgagaccctaagcattatccgacttatcaaaaatgcttgtttaaaattatataatctggcacatatcgcaaccaactcccccctcaaaagtcatgatagtgatgatctcctgttcaaaaaactattctcccctagcaaattaatgacaattatcggtgatgaaattcctcttatatctgaaaaacagagccttagtaaggtgcttttaaatgatgagaataatgaactgagtgatggtacaaacttctgggataaaaatcgtcaattaaccacagatgaaatagcttgctatcttcagaagatcgccgctaatgcaaaaaatactcaagtcaattatcctactggtctctacgtcccctactccaccagaactcacctggaagacgctctcaatgaaaatattaagagcgatccaagttggccgaatgaagtccagttattccccataaatactggcggacactggatattagttagcctacagaaaatagtaaataaaaaaaataataaactacaaataaaatgcgtcatattcaacagtttgcgtgcactaggctatgataaagaaaatagtcttaagcgtgtcattaatagttttaattctgaactcatgggagaaatgagcaataataatataaaagttcatttaaatgaaccagagataatatttttacatgccgatcttcagcaatacttaagccaaagttgcggtgcatttgtgtgcatggcagcccaggaagtgattgaacaaagggaaagcaattctgacagcgccccctatacgttattaaaaaaccatgctgacagatttaaaaaatatagtgcagaagagcagtacgaaattgattttcaacatcgactggcaaacagaaattgttatttagataaatatggcgatgcaaatatcaatcattattatagaaacttagaaataaaacacagtcaacccaaaaatagagcatccggcaaaagagtgagttaacatcattgttaattaattcgaccagtcagcaaatatgctgactggtcgaacatagtttgctaaacagtcatcactgactgatgtcagtcacaccatccgccagttcaatcaggcgaataaattccgccctgtaaccctgtggatcttccccttttgcctgctgagcccactgtttgatctgctgccaggaggtattgttcaggtattcagaaccgcgtaacttttgcccatatgcagctactgctgcgcgaaaacgcatatcttcagagggcgcgtttattgttggccccagcgggaattcaactaactgactttcttttccctgcgggtatttccagcgaatttttaaccaggccagttctttcgttttgtcgcttttcgctaatttgttatccggggcatagcgtaacttatcaatacttgctttttgcccgttcagcgttaattcgaataacaacgttatatgtttgcctgcgcctatatcccctgcatcaacgttgtcgttattaaaatgttccacccgaagttggcgcttttcataaccaatctgacggtattccgttacccacgcggggttaaactcaatttgcgctttgacatcttttgctacggtaatcaacatctgccgcatttcactattcaatactttctgcgcttcagagagggtatcaatgtagctgtagttgccgttaccaacatcggcaattcgcaccatcattgcctcgttgtaattgctattccccacgccaaacgtgctcagagtaacaccagactcccgctgttttttgaccatactttcaatgctttttggatcgtcaatgccaacgttaaagtcaccgtcagtggctaataaaatgcgattgatgccgcccttaataaaccccttcgtcgcctgctgataagccagttccagcccggcaccgccattggtactgccttcggcatccaggctatcaattgcggcattaatttccgccttatgactcccggagatagaaggcaatgcaatacgggagtcgccagcgtaggtcacgatggcaatgttatcctgctcacgaagttctttgaccaataatttcaagctagactggataagtggcaaacgttcatcagaaatcatactaccagaagtgtcgataagaaagaccagattagaagctggtaactcttcacttttgcgatctttcgccaggatatcaactttcagcaatgttcgctgttcattccatggtgcaggtgccaattcgtagcgcatagcgaaaggtattggcttagaggccggaatagattgtttgtctttgatatcccaatcagacgggaaataattgactatctcctccacccgcacagcgtctggcggaggtaacagcccttgattgaggaaacgccttacattcgcataactgccagtgtcaacgtcaagactaaacgtcgccaacggattttgcgctacctgcttaaccggattatcatcgaactgctggtagcgagcggttcctggatttgcgatatgtgtagcttttgctttagccgctcttgcaaatgttggcgcttcctgcaatcgcccctgtaaagcctgtttgtcactatattgttgcacttcttgctgggccaaggctttcgcggcggcggcgctttgctcagcctcttttattgcagcttgctgcgcggcaagcacttgctgctctgtgggagtactgggttgttgttgctgactttccttattctcaggttgcggcccacatccactcaaaatcaaactactcataagcaacatgattatatttttatttcgcatataaaatccttttaaataaactcaggcaccagacataaaatatactctttgtataatcctgctaatcttaataaaatacaatatcgaaacccatagcaaataatgattcaacaacgcaacccattaataatttgcatatgaaaaaaataatctttgcttttattatattatttgtgtttttactccctatgattattttttaccaaccctgggtcaatgcattaccgagtacgccccgacacgcaagtcctgagcaattagaaaaaacagttcgttatcttacacaaactgtgcatccacgtagtgccgacaatattgataatctgaataggtccgcagaatatataaaagaggtctttgtcagtagcggtgccagagttaccagccaggacgtccccattacgggtggcccctacaaaaacattgttgctgattatggtcctgccgatggaccgctgattattattggtgcgcattatgactctgccagcagttatgaaaacgatcaattgacctatacgccgggcgcggatgataacgccagcggtgtggcaggattactcgaactggcacgtttgttacatcagcaagtaccgaaaacaggcgtgcagctggtcgcctatgcgagcgaagaaccgcccttctttcgtagcgatgaaatggggagcgcggtgcatgcagctagccttgagcgtccagtgaaattaatgatagcactggagatgattggctattacgactctgcgcctggaagccagaattacccttacccggcaatgtcctggctttatcccgatcggggagactttattgccgtggtcggcagaatacaggatatcaacgccgttcgtcaggtaaaagcggcattgttgagttctcaggatttatctgtttattctatgaataccccagggtttattcccggtattgatttctctgaccacctgaattattggcaacacgatattcccgccataatgattactgacaccgctttttatcgtaataaacaataccacttgcccggtgataccgcagacagattgaattatcagaaaatggctcaggtagtggatggtgttataactttgttatacaacagtaaataataaaaatttctcgaggcgggtccagaaaaagcgacatgcacattttattttccctcatctgttttaagatgcgaaacatgaaattcaacggaggaaaaataaatgggaatgattggctattttgcagaaattgacagtgaaaagattaaccaactgcttgagtctactgaaaaacctttgatggataatatacatgacacgcttagtggattacgccgactggatattgataaacgctgggattttttacactttgggctgacaggcacctctgcttttgatcccgcgaagaatgatccgctgagtcgtgccgtgcttggtgaacacagcctcgaagatggcatagatggcttccttggattgacctggaatcaggagttagccgcgacaatcgaccgactggaaagtctggatcgaaatgaactgcgtaaacagttttccattaagcgactcaatgaaatggagatttatccgggagtgacctttagtgaagagttagaggggcaactctttgccagcatcatgcttgatatggaaaagctgattagcgcgtatcgacgtatgctgcgacaagggaatcatgcgctgacggttattgttgggtgatatagcttgatgcctgggggagaaagacccattagttaagatttacgccaggatcatcttgaaaaaatctttaaccatggtccggtttttatccccttgtataaatattactaaatgcttgcttagtcgcattgttaaatgcaataccgtatattcggtatgtaacagcgatatcctctgtgctggcaacgatctgtcatgcttgatgaaaacggaattgaacctgtcattaccaggtagataaaaagcctgttcaattttgggattattttttataactcgtgtctgttatggcgacacgggaaaacatcaatattgtccttcacaaattgcagtaatatagaatcaacctctcttgcaagttggtcacaatgtattataagcattttgaatatgtcatcctctgtaatctcgtgaaaattttcggccttgtcttttagctcatcatatcggattcttgcagtaaccattttttgggcgagttctaataaccccaaagcttgcaattgctggtgagtatgatcactttcaaaaaatatcccacactccattccttcccaaccaacatattcatgccattcataaaccagcataaatgtttgtaaaactggcggtaataattggatatctgcaaaaccaaaccaaaacttacgcttgagatcccactcatattcaatcgccaatgctatattgtttaaggcatctccggcatccttatttttacgcaaaatcaattccgtcagtgtatagcgttgttcatcaatacgccgaagagcttctgcaatatcatagtttgtagccaacaaaacattctctgcttcctgatgagtgacgtctgcttttgccgtcaatatattgatttggtcaatatgaaacaacttgatggcttcatcaacatcaccgccagtcctctctaacaaacgtctggcaacctggataccgacaggtacgttcttccgaagtttacgaatttcacttaaccattccatgtcaaacccctttaaatatttatgatattaaatataacaacgtctggataacgacccggcctgactgaatatctcacgttttcctgcttaacattcatgttatgatgctcttgaaactaataatacgtatggaattgtcactatttatctgctaatgaatagtaacaatgtcattcgtttgatgaatatattatttcagggaataattatgacacctttagaacgcattacccaacttgttaatatcaatggtgatgttaataatcctgatactcctcgtccattgttatctcttgaggatttttttattgacaataatatccatggtagtatatgttgcaatgtgattccagaacaatctccgcaagctatctatcaccattttctgaaaatacgtgagcgtaacaatgttagtgatgttttggtagaaattacgatgttcgatgacccagactggccctttagtgaaagtattttagttatcaccactgctagtccagaagaagttcagagctggtttgtagaagaaattgcccctgatgagtgctgggaaggatggagtgaagatacggagcatggatgggttgaagtccctgtgggtatgcatccggttacttgttggtgggattaaaacatttatataaacagataagcggatgtttacataaatttttatgtgaaggaacatgatgaaacttattcctcgcagtagtgatattagtcctggcattgatggaatttgcccggggccttttcctccgaacggatttaccgtacttacagatgcagcatatggtaacggagactgtttcggtttgtactggcctattggtcaggagcataaactacctatagtgtgcgaaacgtaccatgacgaatggcgaatcgtacctgccttttccagcattaagaagttcgaagaatggctggaagtgaatgatgatgatccccatgaaaatggcatcagcatcgaagatcaagactttgcagcaaatctcttccgtgttgctcggaaatgtcttagtacgggaaggcttgatgacgcactgccactgttacagcgagcaacagaacaattgcctgaagtcagcgaatattggttagcactggcaatccagtatcgccgatgtaaaaaaacagaagctgcagcacaggctgcgcttaatgcttatcttggcaattgggcatttggtgttcctgacaataaagtcattcatttgctgagtcaggccgcagatgtcccgaatttccaggatgatcctgtgattcagtgcattaaagaacaaggattagatcttagctttggaggaacaaaggaaaataataattaccccttgatgcagatgtgtgttgatacttattttgcgcagagaaaaccgcttcaggcattaaccctgttacataattatgcctggataatgtccagtgaaacgactgcatttcaggaacgctatgattttaatatcgatgaatggcgggcaaaattcaggcagttatgtttagagtattttggcgatagtcgtacacagttcacttaacgctctgcgtctatctactatcccttctttttcagaaaaaccgccgagcatgtcggcggctttctgacttacaaagtaacagattacatcagcggcattgccaaacgcacaatgctaatcagcggttgtggccatacacccagcaccagtaccaacagtgcagagatcagcacaacgataccgcccgcgctgtactgccagttacttggtgcatcgcgacccggttgttccggggcgtgaagatacaggctcaccgccacgcgcaggtagtagtagaggccgattgcgctaccgacaaccacggcacccaccagccaccacaagtgtgcctggacaccgaccgccagcacgtagaacttaccgataaagcccagcgtcatcgggataccggccagagacagcatcatcaccgtcatcactgccgcgaggatcggacgatgccagaacagaccgcggtaagagaacagggaatcagcatccgggccacgatacgggctggacatcaggctgaccacgccgaacgcgccgaggctgctgaacagataaccggccaggtaaacccctaccgcttccatgctcatctcgccggtttgcagcgcaatcagcgctaccagcagatagccgaggtgagagatagaactgtaaccgagcagacgtttgatattggtctggctcagcgccatcaggttaccgaagatgatggaggcaaaggcgataatcgccagcaccacgcgaatcgcttcgctgtcacccaccggtgcgtagaggaacagacgcatcaccacaccgaagatagcgattttgctcgccgtcgccaggaaagtggaaaccggcgcaggcgcgccctggtatacgtctggcgtccacaggtggaacggcaccagagagagtttgaagccgaggccaacaatcatcaggccgaaacctgccagcaacagcggctcgttgagcataccgtcgccaaggtttttacccaacgcgacaaagctcaggtcgccagactgcgcatacaccagcgccataccaaacagcaggaaagaagacgctgcggcagaaaggatggtgtatttgatactggcttccagactacgtttctggcggaaagcgtaaccgaccaggccaaacagcggcaaagagatcagttcgataccgaggaacagagacgccagatggttggcattcgccagcaggatcccgcccagcgcggcaattaacaccaacaggtagaactcatccttgttgtcgttatagccttcaagccacgggtaggcgaaagtacaggtggcgaggctcgccaacaataccagcccggtgtaaagcatggcgaaaccatcaacgcgcatcagcggcgtaacgtccatagcgcccgcctggccaacaaaccagagcgaaaccagcgccgcgttaagcccaataaccgagagcgtagcgttgaggaaatgattgcgtcgccacgcaatggagagcatcacaaccaccaccgtcaagccgacgatcagcaacggtagcagtgcgatcaggttttgtggagttattgtcatggcgatttacggccttgtagtagtaacggaattaacaaaccactgctggatattgccaatcgcggagtggctggtatccagaatcggctgcggatagaagcccagcagtaccagcagcaccaccagcaacaggatcataaacagctcacgcaggctcatccctggcagttcctggctggcaatctggcttttcgctttaccgaagtaagcgcgatgtaacatcgccaggctataaacagatgcaaagaccagcccaaaggtagagataacggtaatcaccggtacaacctggaagctgccgaacagaatcataaattcgccgacgaagttaccggtgccaggcatcccaagcgttgccaccgcaaagaacaggctcagtgctggcagccatttcatcttgctccacagaccgcccatcatgcgcatgtcgcgggtatggatacgttcataaagctgaccacaaagaataaacagacccgccgcgctcaaaccgtgcgcaatcatctggattaccgcgccctggtaggccaactggctgccggtgtagatagcaatcagcacgaagcccatgtgggaaacgctggtgtaggcgatcagacgtttgatatcggtctgggcgaaggccatccacgcaccgtagaagatgccgataacacccagccacatagcaattggcgcgaactctgcgctcgcgttcgggaacagcggcagggagaaacgcagcaaaccgtaagcggcagttttcagcaagatccccgcgaggtcaacggaaccggcggtcggagcctgggagtgcgcatccggcagccagccatgcagcggaaccaccggcattttgactgcgaaggcgatgaagaagcccagcattaacaggtattccacaccactggacattggcgtattcagcagctcttcatagttgaaggtccagacgccggtcgcattgtagtgaacaaaaaccagcgccaggatggcaatcaacatcaccaggccactcgcctgggtgtaaatgaagaacttggttgccgccgtgatacgcgttttaccgtcagaggctttatgcccccacagtgcgatcaggaagtacatcggcaccagcatcatttcccagaagaagaagaacaggaacatgtcgatggcaaggaacacgccgataacgccgcccaggatccacatcaggttgaggtggaagaagccctgatatttttcgatctctttccagctacatagtaccgccagcacaccgagcagaccggtcagcacgaccatcagcaggctcagcccgtcaatggcgagatgaatagagataccaaaacgcgggatccacggcatgtcgaattcagactgccactgcggaattccggcggattgcgtcagactataaccgccctgcaaccacagttgcaggctcagcgccagcgtcaatcccatggtgatcagcgcgatccagcgtggcaccttgacgccaaagcgttcggtctgccagcacaggaagccgccaataaagggaattaatattagccagggtagtaacatggcgatctttattccttgtaaaagtcccgtcaggaccggattttcaacgaattctcacgacagaaaattctcttcggactgggggtagtgtcggatgcaccgcgaaggcggcttatccgacctacgttcttatatgcccaggggcaatcccacaatccttaactcaacgcagtaccatcaacagtgccagcaccacgaccgcaccgatgctcatggatgccacataccagcgcagatagccgttctcacttaacagcagacctttacctgcaaagcgggaaaggacagccgggatgttcatcatactgttcagcggatcgcgtttcagcaaccaggcaatacccaggaacggcttgacgaacactttgtcatacagccagtcaaatccccaggcgttgtaccaccaggtgcccagcagacggcccggcgcactgttggcgatggaggtcaccagagtacgtttacccagccacagccaggctgccagcagaatgccgaccaccgcgaccacgccagaggtaatttccagggtcaacatgctgccgtgcgccagttccgtcgtttgcggaagcacgccctgcagcggcggtacaatcagtgcgccaacgaaggtggaaaggatcagcagcacaatcagcggcaggctgtgagttacccctttcacggcgtgagcgtgaatttgttcttttccgtggaagacgatgaaaatcatacggaaggtgtagaggctggtcataaacgcaccgaccagacctgccaccatcagattgatatgaccattcgccatcgcacccgcgaggatctcatccttactgaagaagcccgcagtgaccagcggtagtgcgctcagtgctgcgccgcccaccaggaagcagagataaaccagcggaatagatttacgcagaccgcccatcttgaagatgttctgttcgtgatggcaggccagaatgacggaaccggatgccaggaacagcagcgctttaaagaacgcgtgggtcatcaagtggaaaatcgccgcatcccatgcctgcacgccaagcgcgaggaacatgtagccaatctggctcatggtagagtaagcgagaacacgtttgatgtcggtctgtaccagcgcggcaaaaccggccagcagcagcgtaaccgccccgacaatacccaccagatgcagaacttccggcgtcatcaggaacaggccgtgggtacgggcgatcaggtagacacccgcggttaccatggttgcggcgtggatcagcgcggagacaggcgtcgggcccgccatcgcgtcggcaagccatgtctgcaacggcaactgcgcagatttaccgaccgcaccgcccagcagcatcagcgtcgcccacatcagcatgttattgccgtcagcaaagtgcgctggtgccagttccaccatttcgcggaagttcagggtgcccagttcgttgtaaagaatgaacagtgcgaaagcgaggaacacgtcacccacacgggtcacgacgaacgctttcattgccgctgcgccattcttcggatcggtgtaatagaacccgatcagcagataggagcacaggcccacgccttcccagccgaggtacatcagcagcaggttgtcggcaagcaccagaaccaccatgctggcgatgaacaggttggtgtaagcgaagaagcgagagtagccctcttcaccgcgcatataccaggaggcgtacatgtgaataaggaaacccacaccagtgaccacgctgagcatggtcaggctcaggccgtccagcaccaggttaaaaccgatgttaaagtcgcctacgctcatccacgtccacagcggctggctgtatgtctgctcgccgttagcgaagaaatcaacgccgataaaggcggttaccagcgccgccaggcccacagagcctacgccgacgatcgcgctgacgttttcagaccagcgcccacgggagaatgccagcaggacgaagccaatcaatggcaaaataatggttaaggcaagcatgttcatccgcgcatctcacttacactatcgatgttcaggttctggcgacgacggtgaagttgcagcagcagcgcaaggccgatactcgcttctgccgccgcgaggctgatggcgagaatgtacatcacctgaccgtcggtctggccccagtagcttccggcgaccacgaaggccagcgcggaggcgttaatcatgatttccagaccaatcaacataaacagcagattgcgacggataaccagaccggttaagccaagaacgaataagattgccgcgaggatcagtccatgttgtaaggggatcatgcgtgctcctccgtttttcttttcgcgctgtcgtctttacgattgctcagcacttcacccgcacgctcttcacgaccgacgtggaaggccacaaccagacctgcgagcagtagcatagaagccagttccaccgccagtacgtaaggcccgaacagcgtaatacccactgctttagcactgattggcgtaccgtcgataccctgatcgttaacaccgaggatggcgtaaacaatcaccaccagcatgatggcgctcaaaattgccggaccaatccacacctgcggtttcagccactggcgttcctgttcgatttcactaccgcccaggttgagcatcatcaccacgaacacgaacagcaccataatggcacccgcgtagacgataatttccagcgcaccggcgaagtaagcgcccagactgaagaacaccccggaaatcgccagcaggctaataatcaggtacagcagtgcgtgtaccggattggtatgggtgatcactcgcaaggtcgcaagtatggctatcaggccacagatataaaaagcgaactccattgcccctctccttacggtaacaggctcttgacgtcgataggcttggcttcgttctctgcttcgcccttatctttgccgtcgattgccatacctgccatccggtagaagttatattccgggtatttgcccggaccggagatcagcagatcctctttctcgtaaaccagatcctggcgcttgtattcccccatttcgaaatccggggttaactgaatcgccgtggtcggacaggcttcttcgcacagaccacagaaaatgcagcgactgaagttgatgcggaaaaattccgggtaccagcgaccgtctttggtttctgctttttgcaggctgatacagccgaccgggcaggctaccgcgcagaggttacaggctacgcaacgctcttcgccgtccgggtcgcgggtcagaacgatacgaccacgataacggggcggcagatagaccggctcttccgggtacattcgcgtttcgcgtttggcgaacgcgtgcaggccgatcatccagatactacgaacctgggtgccgaaacctactaacaattcttttaaggtcatggtcttattgccccttattgcgcctgccagagaatgacagccgccgttaccagcaagttgatcagcgtcagcggcaggcagattttccagccgaaggacattacctggtcataacgcggacgcggtaagctcgcacgaatcaaaatgaacatcatcataaagaacgcggttttcagcgcgaaccagatgaatggcggtaacaacgggccttgccagccaccgaagaacagcgtcaccatcaatgcagagatggtcacaatcccgatgtactcacccacgaagaacagaccgaacttcataccggaatattcaatgtggtaaccatccgccagttcctgctcggcttccggctggtcaaacgggtgacggtgacataccgccacgcccgcgatggcaaaggtaataaaaccaaagaattgcgggataacgttccacacatgcgcctggctgttgacgatgtcggtcatgttgaaactaccggcctgcgccaccacgcccatcaaggaaagcccgaggaacacttcgtagctcagggtctgcgcagaagcacgcatcgcacccagcaagctgtatttgttgttactactccagcccgcaaacagcaccgcgtaaaccgccagacctgccatcatcaggaagaacaaaatcccgatgttcaggtcggcaaccacccaacccggactgactggcacaatcgcaaaggccagcagcaggctggtaaaggcaatcatcggtgccagggtaaagatgacgcgatcgctgaatttcgggatccagtcttctttaaagaacattttgatcatgtccgcaaccagctggaggctaccgccccagccaacacggttaggtccgtaacggttctggaacagacccagcaggcgacgttcgccaaagctcatgaatgccccgcaggtgacaaccaccagcaggatcaccaccgctttgaggatggtcagcaggatctcaatcagttccggacttatccaactcattgttgtgcctccttgagatcctcaagatgcgcgccagccagcaccggagcaatgccggacatacccatcggcaagcccacctgccctgccgtcagtccttcggcgatttcaaccggcagcgtgaccgtgttgccatcgtaactaaaggagacgcgtgtacctgcgttcacacccaacttcgcggcatccgctgggttgagtttgatgtacggctgcggcatacggctctggaagaccggagcacgctgactcaattcatcgctgccaaacaggtggtaatacggcgcgatacgccatttcccgtcctgcggctggaagcgtgccggtacgctggtgaagtaatccagaccattttcgctggtttcaaacagacgcacgcccggatcgccaaagcgcagtttgccgcccacttcgtcctggaatttgttccacgcctgcggggagttccagcccggcgcccaggcaaacggcacttggctacggtgcgcagtcggctggttgttaccttccatgctgaaggtgaacatggtgtcaatatcctgcggctgacgcggctcatgaacgctgatattggcgcgcatggcggtacgaccgctgtaacggtgcggttcacgggccagtttctgcccacgaatacggaatgtcgcatccggcgcagcatctttgatacctgccagttccgggattttcgccacaacagcgtcaatcacatggtcgagctgcgtccagtccacttcacggctcagcagggtgctgtgcaggctgtgtaaccagcgccagctttccagcatgacagttttgctgtcgtaataagcaggatcgtaaacctggaagaaacgttgggcgcggccttcgttgttgatcaccgtaccgtcgctttcagcaaagctggcagcagaaagtaccagatgggcgttttccataatcgctgtgcgttgatgatcaaccaccatcaccagcggtgctttagccagcgcagcattcacgcggatagcagaagcgtgacgatgcagatcgttttccaacaccaccaccgcgtcggcgcgtccggtttccagttcggttaacgcttcttcaaggctaccgccacccataatgcccagccccatgctgttgacggaacgggcaatcatggtgataccgacgtcagcgccgcgacctttcagggctttcgcgacgttagccgccgcctgaatcacctctaagctaccggcgttcgtcccggagataatcaacggtttcttcgcacctgccagtgcctgcacgatgacgtcgattttgctttgcagctcaggttcgataccgtcaaccgctggtgcagagttatccagcgcatgggcgatggcaaaacctaaacgcgcctgatcttcaaccggtgcgcggtaagtccacgccgcgatatcatccagacgggtgtcatcaacgttggtaacaaacagcggatgcttcgcacgttgaccgatgttgaggattgccgcaatctgccagtcagccactttctgtgctgccgccatttcgcgcgctttacctttcacagcctgacgcactgccagcgcgacgcgcgcgccggtctgggtaacgtcttcgcccagcaccagtaccgcatcgtaagattcgatttcgcgcagagccggagtataaatgccgccttcacgcagcactttcagcgccagttgcagacgttcctgctcaccgtgagcgataccggtgtagaagttttcttcgcccaccagttcacgcagcgcaaagttgctttccacgctggcacgcggagaaccaataccgatcactttcttgctctgacgcagaatatctgccgcgccctgcattgcctgttcggcgttgagggtaatgaaatcatcgccacgacgctgtactggctgacgcggacgatccttcaggttgacgtaaccgtaaccgaaacgaccacggtcgcagaggaagtagtggtttaccgtaccgttgtaacggttttcgatacgacgcagttcgccgtaacgttcaccggggctgatgttacagccgatggaacattgctggcagatgctcggcgcaaactgcatatcccatttacggttgtaacgctcggagtgcgttttgtcggtaaatacgccggtcgggcaaatttcgaccaggttaccggaaaattcgctttccagcgtgccgtcttccgggcgaccgaagtagacgttgtcgtgcgcaccgtaaacgcccagatctgtaccgtcagcgtaatctttgtagtaacgcacacagcggtagcaggcgatgcagcggttcatttcgtgagagatgaatggccccaaatcctgattacggtgggtacgtttggtgaaacggtagcgacggaagctgtgtccggtcatcacaatcatatcctgaagatggcagttaccgccctcttcacataccggacagtcgtgcgggtggttggtcatcaaccactcgaccacgctttcacggaactgtttcgcttcttcgtcgtcaatggaaataaaggtgccatcggaagccggtgtcatacaagacatcaccaggcgaccacgcgtgtcttccgcgttttggtattgcttcaccgcacactggcggcaagcaccgacacttcccagcgccggatgccagcaaaagtaaggaatatcaaggcccagagacagacaagcttccagcaggttgtccgctccgttgacctcgtattctttgccgtctacatgaattgtagccattagcatgcttccagttttctcagtcagagactgagcgttaatcgaaattcggttaccagcgctctttcagcaggttcggctgaatcccattaatcaaatgggtattgctgaacggctgtttgattcccgcctcaaattcttcgcggaaatatttgatggcgctctgtaacggctccactgcaccaggtgcgtgggcacagaaagttttacccgggcctaagaatcgacacagttgctcaagtgtttcgatatcgcccggctgaccttcaccacgctccagcgcacgcagaattttcacgctccacggcagaccgtcgcggcacggcgtacaccagccgcaggactcacgggcgaaaaactcttccaggttacgcaccaggctcaccatgttgatctcatggtcaaccgccatcgccagcgccgtacccagacggctgcccgctttaccgatactttcgaattccatcggcagatcaaggtgcgcttcggtcaggaagtcagtccccgcgccgcctggctgccaggctttaaatttcagaccatcacgcataccaccggcgtaatcttcgaggatctcgcgtgcggtggtgccgaacggcagttcccacagtcccggatttttcacccgaccggagaagcccatcagcttggtgccagcatctttacttttgctgatgttctgataccactccacgccgttagcgaggatcgccggaacgttacacagggtttcgacgttgttgacacaggtcggtttaccccatgcgccggaggttgccgggaagggtggcttgctgcgtgggttagcacgacgtccttccagggagttgattaacgctgtttcttccccgcagatgtagcgccctgccccggtatggacgaacagttcgaaatcgaaacctgttcccataatgtttttgccaagcagacccgcttcggtggcttcggcaatggcacggcgcagattaactgccgcttcgatatattcgccacgcaggaagatgtagccacggtaagctttcagcgcaaacgcggagatgagcataccttccaccagcaggtgcggcagttgctccatcaacaggcggtctttataggtgcccggctccatttcatcggcattacacagcaggtaacggatgttcatggattcgtctttcggcatcaggctccatttcaggccagtgctgaagcccgcgccgccgcgccctttcagaccagcgtcttttacctgattaacgatttcgtccggagacagcccggtcagcgccttacgcgcgccttcgtaaccgtttttgctgcggtattcgtccagccacactggctgtttgtcatcgcgcagacgccaggtcagcggatgcgtttcgggagtacggataatgtttttcatttataccgctccagcagttcagggatcgcttccggggtcagatgcgcgtgagtgtcctcatcgatcatcatgtttggccctttatcacagttccccaggcagcaagttggcagcagcgtaaagcggccatcaaatgtcgtttgccctggtttgatgttcagctttttctcgagcgccgcctgaataccctgataaccgttgatatgacagaccacgctgtcacaataacggatcacatggcgaccaaccggctggcggaagatctgactgtagaacgttgccacaccttcgacgtcgcttgccggaatacccagcacatcggcgatcgtgtggatcgcaccatccggcacccagccacgctgcttctgaacgattttcagcgcttcaatggacgccgcacgcgggtcttcgtagtggtgcatctcgtgctcgatcgcttcacgctctgccgcactcagctcaaaagcctcggtttgtggttgttgattctcgtgcataattagcggtccacatcactcataacaaaatcgatactgcccagataaacaatcaggtcagacaccaggctgccgcggatcgccgccggaatttgctgcaaatgcgcaaagctcggggtacgaacacgggtgcggtaactcatggtgctgccgtcgctggtcaggtagtaactgttgatccctttggtcgcctcaatcatctggaaagattcattggcaggcatcaccggaccccagctcacttgcaggaagtgggtgatcagggtttcgatatgttgcagcgtgcgctctttcggcggcggcgtggtcagcgggtgatccgctttgaacgggccttccggcatgttgttgaggcactgctcaagaatgcgcagactctggcgcagctcttccactttaagcattacgcgggtgtagcagtcagaaacgccaccacccaccgggatttcaaagtcgaagttttcatagccagaataaggacgcgccttacgcacgtcgaagtcgatcccggtagcacgcaggcccgcgccagtggtgccccactccagcgcctctttcgcgccataggcggcaacgccctgggaacgacctttcagaatggtgttttgcagcgccgctttctcgtaagacgccagacgtttcggcatccagtcgaggaactcacgcagcaggcgatcccagccgcgcggcaggtcgtgcgctacgccgccaatacggaaccacgccgggtgcatacggaaaccagtgattgcttccaccagatcgtaaattttctgacgatcggtaaaggcgaagaacactggcgtcattgcgccgacgtcctgaataaaggtgctgatatacagcaggtgactgttgatgcggaacagttcggagagcataacgcgaatgacgttaacgcgatccggcacggtgatcccggccagtttctctaccgccagcacgtaaggcatttcgttaacgcagccgccgaggtattcgatacggtcagtatacggaatgtagctgtgccaggactggcgttcgcccattttctccgcaccacggtggtggtaaccgatgtctggtacgcagtcgacaatctcttcgccatcgagttgcaaaacgatacggaaagccccgtgcgcgctcgggtggttcggaccgaggttgaggaacatgaagtcctcgttttcggtgccgcgcttcatcccccactcttccggtttgaaggtcagggcttccatctccagatcctgtttggctttggtcagctcaaacgggctgaattcggtagcgcgcgccggataatctttacgcagcgggtgacctttccaggtttgcggcatcatgatgcgtcgcaggttcgggtgaccgtcgaaagtaatgccaaacagatcccaggtttcacgctcataccagttagcgttcgggaacagtttggtgaaggtcggtacgtgcaggtcgttttctgccagcgccaccttcagcatgatgtcgcggttacgatcgatagaaatcagatggtagaaaacggaaaaatccgcggcaggtaacccttcgcggtgtgtgcgcagacgttcgtccatgccgtgtaagtcaaacagcatgacgtaaggtttcggcagtttctttaagaaatcgccaacttccagtaattgttcacgcttgatccacacaacgggaaccccggtgcgagtcgcctgaacagtaaaggcatccggcccaaaacggttgcgcagttcgccaatcaccggatcatcaagatgatcgcgggtctgccaggcgggttcttgcgcggttaagtcggtcatattgttcaccattgcaaatggtccgtggtgactgtcggcgcagtaagcttcgcgaaatagatttaggaataagcgaagaaaaatccctttgccgacaggcgcaaattaaatctcgtcaggtgtacgcaggttagttacggcaatgcgttcaccgcgcttgcgttcgcgctcactttgcatattggcgcgataaacgccctgatcgccaaccacccaggagagcggacgacgttctttgccgatagattcctgcaacagcatcagtgcctgcatgtacgcttcaggacgcggcgggcagcccgggatatacacatcaaccgggatgaatttatcgacgccctgcacaacggaataaatatcgtacataccaccagagttggcacaggcacccatactgataacccattttggttccagcatctggtcatacagacgctgaataaccggtgccattttggtaaagcaggttcctgcaaccaccatcaggtcagcctgacgcgggctagcacgcaatacttctgcgccaaaacgcgccacgtcatgcaccgcggtaaagctagtcaccatctcaacgtaacagcaggaaagaccgaagttatacggccaaatactgtttttacgaccccagttaaccatgtcattgagcttgcccataaacacgtttttgttaacttcttgctccagagggtcggttacgatctcctgcttttgcagggggtaacggtcgttctcaccgttgggatctatgcgggtgagcgtataatccatcttaatgcctcgcggttagcgttgacgattagcgatactgttcgtttccgggttcatacgctcgcggcgactacgcgcgggcgtccagtccagcgcgccaatacgcaccagataaaccagacctgccagtaacacaaaaataaaaattgcagcttccacaaagcctacccagccgctttcgcggatagaggtactccatgcgaacagatacagcgcttcaacgtcgaagataacgaagaacatggccaccagataaaacttggcggacaggcgtaagcgggcggagccgacgctgtcgataccggattcaaacggcacgtttttgctcctcgcgcgtgcgcgaccgcctaaaaaccaaccgcctaccagcatcaggcaacacaggccaatggcaacgataagaaagatagcgaatgcccagtgatgagcgatgacttcagtggatgtactcatactcattgcttactcatcaaaagtagcgccagattcactgctcttcacggcagatggacgccacatcgattcatggggaggaataaaaaaaaccttacaatcactgtagaaattcttttatacagctaattgatgtggttttttactcctttctataaccttttgtcaactttaacaaaagtttcttcacattagtttacataatatcaacaccattagcatttaatgccctttcaccccagatccttgacgactccaggataattagatgttgttgaatcgtgtccgttgtgaagcaatggaaaaaatacgggtctattttgacaggaatttgtgtcgattcctccccccaaaagagagtattttcttgatctgtgacacgcttttgtcattccataacaaaaacgcagcaacaaatttacgtattttttaacatcattgtagcaggtgatttttttcaggcgattatttgtgcgttcgggacgtgaatctctggtggttgaaaaatgaacagttttgtacgttctgcactatgcgatgaaggatttttactaaaaaaaagccgctggggtttaaaacacccccagcggctcgttttttacactattgtctcaggaattatctatcgtccgtcgattactcgatatccctttcaatcaacaaactatcatccccttccggagcagacattgggctgtattgccacggattatggtagctctccatcgcctgatagatcacctgggccagctcattattactggacggatcatagcacagcaaatattcggtatcaggtagcggcggtaagccatctactccactcagcacacgcaggtccgggctcatcatctcaaccggccttgccgtcacgccaagaccggctttcactgccgcacgaacggccggaagcgtgctggcgacataagccagtcgccatggaatatctgctttattaagcgtcgccagcaccatatcgcgaaacgggctaggatcatccagcaatacaagagggatcggctcgcctttttgcaatatgtattccgctgcgcagtaccagtgtgttgggctggtacgcaggttcaatgccttaaacgcactaggacgatgggtggttaccatcaaatccacttcctgggattccagcatttctgccatataggcattacgtttaacgcggacatccagcgctaatttcggataaacgctactcacgcgatttaacaggaaaggtaagatcgtatcggcagattcatcactagcaccgatagttaatacgccctgaagattactgaacattaaactactgcaggcctcatcattaaaacgcaggattttcctggcgtaaccaagaagttgaatgccatgttcagttaacagtttgttgcgaccgtgacgagcgaacagttctttcccaacgagttgttccagacgctgcatttgctgacttacggcggactgagtacgacacacagcggcagctgcggcagcaaaagtgttcagatcggcaacagcaacaaatgttctcagcagatcgaggtcgaggttaattatcggacgatttgcacttatcatatattatcacttactggcggctcatactgagctggttaatgctgtgcacacacaaacaagcaattccatttgtaatgtgcctccctggcagtttcatccggaacccggacgaaagtaaaaatgcatatgagttgcactaaaaaagcgactcacattgttccgttataatgcctgaagtagatcacagaatatatcttcagggatcgcatatctattaagttactcactcttttctatttatgacatgcgcgtgtttgtataaatgtaaatgtgagtccttgttccactctcgtgcagcatcgctggtcatacgcgaacacgtaccaacagcaatggtgaggcggcatcaagagcagggatccgtcatttatccgagcattttaccccaaaaaccttttatttataagggtcattgcgaattatctgatgcaaagttatgttatgttaggcaaagtaatcttctattattaataagcacatcaaaacctttttgaatattaaataataattaattagcatcatcctcattcattaattccgcttaacaatagtttcacaccttgcccccattgcgacacctcggaaatcatcacgcagttaaactctccgtaatgaggaaatatcatcatcgcgtttcattagtgaattcttaaatgaggcattttcacacaattatcttacagataaaaaaaccagacttacaattaagaatcagaacaattcactatataacattgcatgtaaagcatatacacctcattattttgtcattattaagttattaacagcacaatcgagccttcccctctggcaaaatcttattctgcagaccttcaaaacaccgtcctgggggagtacattgttctaagctgacttccacggcagggagtggcgataacagcaaaaaaggtcaagattcatgtcccccattgaaaaatccagcaaattagagaatgtctgttatgacatccgtggtccggtgctgaaagaagcaaaacgcctggaagaagaaggtaacaaggtactgaaactgaacatcggcaacccagccccgttcggttttgacgcgccagatgaaatcctcgttgacgtgatacgcaacctgcctaccgctcaagggtattgcgattccaaaggtctttactccgcgcgtaaagccatcatgcagcactaccaggctcgtggcatgcgtgatgttaccgtggaagatatttacatcggcaatggtgtaagcgagcttatcgttcaggcaatgcaggcattgctgaacagcggggacgaaatgttggttcctgcaccagattacccactctggaccgcggcggttagcctttccagcggtaaagcggtgcattatctttgcgatgaatcctctgactggttcccggacctcgatgatattcgcgctaaaattacgcctcgtacgcgtgggatcgttattatcaacccaaataacccaaccggcgcggtatattccaaagagcttttaatggagattgtggagattgcacgtcagcataatctcattatcttcgccgatgaaatttatgacaaaattctctacgacgacgctgagcatcacagtattgcgccgctggcacctgacctgctgaccattacctttaacggactgagcaaaacgtaccgcgttgcaggcttccgtcaggggtggatggtgttgaacgggccgaaaaaacacgccaaaggctacatcgaaggtctggaaatgctggctagtatgcgcctgtgtgctaacgttcctgcgcaacacgccattcagaccgcgctaggtggttatcagagcatcagtgaatttattacccctggcggtcgtctttatgagcagcgtaaccgcgcgtgggaactgatcaacgatattccgggcgtttcctgcgtgaaacctcgtggtgcgctgtatatgttcccgaaaatcgacgccaaacgctttaacattcacgacgatcagaaaatggtgttggatttcctgttgcaggaaaaagttctgttggtgcaagggacggcattcaactggccgtggccggatcacttccgcattgtcacgctaccgcgtgtcgatgatatcgagctgtctttgagcaagttcgcgcgtttcctttctggttatcatcagctgtaatcttaatttcactgccggagattgcatccggcagcgttatcccgccacaatgacctgatgatgtcatcatacgtaaggtcactatgaaacagagccatttttttgcccatctctcccgcctgaaactcattaaccgctggccgctcatgcgcaacgtgcggacggaaaatgtgtccgaacacagtttgcaggtagcgatggtcgcccatgcgctggcagctatcaaaaatcgaaaatttggcggtaatgtcaacgccgaacgtatcgctttactggcgatgtaccacgatgccagtgaagtgctcaccggcgatctccctactccggtgaaatacttcaatagccaaatcgctcaggagtacaaggctattgaaaaaatcgctcagcaaaaactggtcgatatggttccggaagagctgcgggatatctttgcgccgttaattgacgagcatgcatatagcgatgaagaaaaaagcctggtgaaacaggcagatgcactgtgtgcatatctgaaatgtctggaagaactcgcggccggaaataatgaattcttgctggcaaaaacgcgactggaagcgacgcttgaagcgcgtcgcagccaggagatggactacttcatggaaatatttgttcccagcttccatcttagcctcgatgagattagccaggatagtccgctgtaagcagccggagtctgcgtcgcatcaggcaataagcgccggatgcgacatcaggctcttgtcaaaacggaaacagcatcgggatcatcaccacacaaaccgccatcacgataatggtgaacggtacccccaacttcacaaagtcactgaagctgtaatttcccggacctaaaaccagtgtgttaacaggactagaaaccggtgtcataaaggcggcggatgctgccatcgccacgaccatcgcgaatggataagggctcacccccatcgttttggcagcagccagcgcaatcggagccatcaacaccgccgtcgcggtattagagataaatagcccaataaccgcgctcaagacaaacaaacaccccagcatcatatgtggcccgtaaccaccgccaatgtccatcagccctttcaccgccagcgcgacacctcccgttttctgtaatgccacagcaaacggcatcatcccaacgatcaaaataatgctcggccagtgaatggatttataggcgctttcagcatctatacagcggaatttccccatcagcaggcaggcgatgatagcggcaacaggattaggaatttcatctgtcagcattaacgccaccattagcaccagacagaaaatggcatggggtgcctggctgtgcgcgggacttgcttcactcacctcttccggtaagttcagcgctacgaagtcgcggccctgtttggccagcataccgatcagtttccagttacccacaaccaggatgatatcgcccagcagcagaggctcatccgccaggctaccttccagcgccacgccattgcgctttagccccaccacattcagtccgtagcgggtacgaaaaccaatttcgcgcacgcttttaccaatcagttcactctcaggaattaaactaatctctgccatgcccacatcaagggcctggtcagaaaatactcgccgcgcagtaccatcggctccagcaattgctcactacaaaattgccggagatcgacatcagccgcagacatatcaataagcaaaacgtcacgcgcgcgaaattcagaaaccccattaacgttcacgataacgcgacgaaaacgccgccagcgttcaacaccgatgacgttagcgccataacgctcacgtaatttgagatcatccagccgttgaccaatcattgggcttccggggcgaatagccagacgtcgcgcacgcccggtcagtcgatattcacggataagatcgcgaaaggttcgacgcgtccagccttcgcgctgcggggtctgggtatcccctttcagcatgaaacgcatcactaacatatacaaaatacccagcaccagcacgaccaggccaataggtgttacgctaaagaaactgaagccgtgatagccttcacgcagcaattcactgttgactaccaggttcggcggcgtcgccaccagcgtcatcatgccgctaatcagcccggcaaaacttaacggcatcatcagacgactcgggctcgtttgcatacgcatggcaacgcttaacaccacgggaataaagatagcgacaacgccggtactactcataaacgcgccaagccccgcgacggtcagcatcaacaaaaccaacattttgatttcactattgcccgcaactttgaccagccatgttcccattacggtggcaacaccggtacggaccaaaccatcgccaataataaacaaggcggcaatcaggacaacgttaggatcagaaaagccggaaaatacttctgggactgtcagcgttccgcttaatgcaaacgcgacaataacaaacaaagcgaccgcatccatacgcactctgcccgtcgcaaacaagacgatggcaacggccagtaaactaagaacccaaatcaattcaccgttcacaacttatccttgttaattgagggggatgacttgattctgccataaaaaagccccgacgagacggggctaaatcatgatcaggtgtttcactgaataataacatcgccatttggctgtttggtcacagtaatttgctccagactgtggaggaccaaatcgacctcattcaggcgcggggtatctgccggagcgttaaccgcaatgacatgacaacccgccgccaggccagaaagcacgccagcgggagcatcttccaccaccacacactcctgcggcgcaagccccagcagctgcgcgcctaacagatacgcatcaggttctggttttccgcgcttcactcgctcagcggttacaaacacctctggtgcgggaagcccagctattttatggcgcgctcgcgctaccggcatggagccagaagtcacaatggcccacggaatacctgctttattcaaatgactgagtaaggcgattgcccccggaagcgcggtaataccttcggtttccgtggcctcgatgtgctccagacgcgtaaactcggcggcaatatcagcctcggatttgcccgccataaaatggcgcagagaggtgatcgcctgtttaccgtgaatgaaagccagcacctcttccggcgctaacccatgacgtctggcccagttgctccacgcccgttctaccgcaggcagggaatccaccagcgttccatcaagatcaaacagaaaacctttgcaccgcacgcgggcctcctcaggcattgataatttgattaatttcgttggcgctcaaatggtactgacgcgggcaggcatgccacacattaagcatgcgctgatatttttcccacattggcgtctgggcgttaaaaccgtgagttccggcgtcaaaatgggtatagcgcccttccacattaaccataaagcggacataaccgaggtaacgtgcttcagtggcggcgtcaaagccgaggaaggtgacacgacgttcatcgatggattgctggtcctgcaaattagaccaggaaacatgcaacgcatgatacatctccataatgtcgatgatagtgcggcaggtttcttctttcagctcgccaaactcgcgatccaattcacgcatctgtaatccgtaaccacgctcaataattgtttgcaggcgacggtaacgttcagcatttgccggatcgagcatagtcatcatcttgtactgattagacaaaataagacgttgcgcgttggtcatttccattgttgactcctgtatcactctactacggtgaaaaaaaagaaggctgagtatgccttcttttatatgcgtaatcaggggtcaattacaaatcatcaaggaaagttttatccagttgtttgaaggcgcgcttaagcgtgtcagctaatgcctggtaatcaggcttgccttcaacgggtgccaacacctgtccagactcctgcaatttaccgcgaacttcataaaaccagttaaggattgcagggggtaatggcgtgacagaacgcttgcccagccaccacaatccctgcatgggtaaacttaaggcgaacagggcagtggcaactgccggcccaagctgaccgcccagggcaatctgccagcagagagtaaatacggcgatcggcggcataaaacggatcgcataacgcgtcatcttgataacgcgattttcgacaaagaccggggcaaggcgtttttccagcggccacgtcttactgtaatgctgtccccggcgaaacaagctaaaaaaattaacagaacgattatccggcgtactcatgcttcacctcaacttcacatataaagattcaaaaatttgtgcaaattcacaactcagcgggacaacgttcaaaacattttgtcttccatacccactatcaggtatcctttagcagcctgaaggcctaagtagtacatattcattgagtcgtcaaattcatatacattatgccattggctgaaaattacgcaaaatggcatagactcaagatatttcttccatcatgcaaaaaaaatttgcagtgcatgatgttaatcataaatgtcggtgtcatcatgcgctacgctctatggctccctgacgtttttttagccacgtatcaattataggtacttccatgagcagtaagttagtactggttctgaactgcggtagttctagtctgaaatttgccatcatcgatgcagtaaatggtgaagagtacctttctggtttagccgaatgtttccacctgcccgaagcacgtatcaaatggaaaatggacggcaataaacaggaagcggctttaggtgcaggcgccgctcacagcgaagcgctcaactttatcgttaatactattctggcacaaaaaccagaactgtctgcgcagctgactgctatcggtcaccgtatcgtacacggcggcgaaaagtataccagctccgtagtgatcgatgagtctgttattcagggtatcaaagatgcagcttcttttgcaccgctgcacaacccggctcacctgatcggtatcgaagaagctctgaaatctttcccacagctgaaagacaaaaacgttgctgtatttgacaccgcgttccaccagactatgccggaagagtcttacctctacgccctgccttacaacctgtacaaagagcacggcatccgtcgttacggcgcgcacggcaccagccacttctatgtaacccaggaagcggcaaaaatgctgaacaaaccggtagaagaactgaacatcatcacctgccacctgggcaacggtggttccgtttctgctatccgcaacggtaaatgcgttgacacctctatgggcctgaccccgctggaaggtctggtcatgggtacccgttctggtgatatcgatccggcgatcatcttccacctgcacgacaccctgggcatgagcgttgacgcaatcaacaaactgctgaccaaagagtctggcctgctgggtctgaccgaagtgaccagcgactgccgctatgttgaagacaactacgcgacgaaagaagacgcgaagcgcgcaatggacgtttactgccaccgcctggcgaaatacatcggtgcctacactgcgctgatggatggtcgtctggacgctgttgtattcactggtggtatcggtgaaaatgccgcaatggttcgtgaactgtctctgggcaaactgggcgtgctgggctttgaagttgatcatgaacgcaacctggctgcacgtttcggcaaatctggtttcatcaacaaagaaggtacccgtcctgcggtggttatcccaaccaacgaagaactggttatcgcgcaagacgcgagccgcctgactgcctgatttcacaccgccagctcagctggcggtgctgttttgtaacccgccaaatcggcggtaacgaaagaggataaaccgtgtcccgtattattatgctgatccctaccggaaccagcgtcggtctgaccagcgtcagccttggcgtgatccgtgcaatggaacgcaaaggcgttcgtctgagcgttttcaaacctatcgctcagccgcgtaccggtggcgatgcgcccgatcagactacgactatcgtgcgtgcgaactcttccaccacgacggccgctgaaccgctgaaaatgagctacgttgaaggtctgctttccagcaatcagaaagatgtgctgatggaagagatcgtcgcaaactaccacgctaacaccaaagacgctgaagtcgttctggttgaaggtctggtcccgacacgtaagcaccagtttgcccagtctctgaactacgaaatcgctaaaacgctgaatgcggaaatcgtcttcgttatgtctcagggcactgacaccccggaacagctgaaagagcgtatcgaactgacccgcaacagcttcggcggtgccaaaaacaccaacatcaccggcgttatcgttaacaaactgaacgcaccggttgatgaacagggtcgtactcgcccggatctgtccgagattttcgacgactcttccaaagctaaagtaaacaatgttgatccggcgaagctgcaagaatccagcccgctgccggttctcggcgctgtgccgtggagctttgacctgatcgcgactcgtgcgatcgatatggctcgccacctgaatgcgaccatcatcaacgaaggcgacatcaatactcgccgcgttaaatccgtcgctttctgcgcacgcagcattccgcacatgctggagcacttccgtgccggttctctgctggtgacttccgcagaccgtcctgacgtgctggtggccgcttgcctggcagccatgaacggcgtagaaatcggtgccctgctgctgactggcggttacgaaatggacgcgcgcatttctaaactgtgcgaacgtgctttcgctaccggcctgccggtatttatggtgaacaccaacacctggcagacctctctgagcctgcagagcttcaacctggaagttccggttgacgatcacgaacgtatcgagaaagttcaggaatacgttgctaactacatcaacgctgactggatcgaatctctgactgccacttctgagcgcagccgtcgtctgtctccgcctgcgttccgttatcagctgactgaacttgcgcgcaaagcgggcaaacgtatcgtactgccggaaggtgacgaaccgcgtaccgttaaagcagccgctatctgtgctgaacgtggtatcgcaacttgcgtactgctgggtaatccggcagagatcaaccgtgttgcagcgtctcagggtgtagaactgggtgcagggattgaaatcgttgatccagaagtggttcgcgaaagctatgttggtcgtctggtcgaactgcgtaagaacaaaggcatgaccgaaaccgttgcccgcgaacagctggaagacaacgtggtgctcggtacgctgatgctggaacaggatgaagttgatggtctggtttccggtgctgttcacactaccgcaaacaccatccgtccgccgctgcagctgatcaaaactgcaccgggcagctccctggtatcttccgtgttcttcatgctgctgccggaacaggtttacgtttacggtgactgtgcgatcaacccggatccgaccgctgaacagctggcagaaatcgcgattcagtccgctgattccgctgcggccttcggtatcgaaccgcgcgttgctatgctctcctactccaccggtacttctggtgcaggtagcgacgtagaaaaagttcgcgaagcaactcgtctggcgcaggaaaaacgtcctgacctgatgatcgacggtccgctgcagtacgacgctgcggtaatggctgacgttgcgaaatccaaagcgccgaactctccggttgcaggtcgcgctaccgtgttcatcttcccggatctgaacaccggtaacaccacctacaaagcggtacagcgttctgccgacctgatctccatcgggccgatgctgcagggtatgcgcaagccggttaacgacctgtcccgtggcgcactggttgacgatatcgtctacaccatcgcgctgactgcgattcagtctgcacagcagcagtaatctcgtcatcatccgcagctttgcgctgcggatatctgaaccggaaataatcactatttccggttttttattctcttaatttgcattaatcctttctgattatcttgcttaactgcgctgcatcaatgaattgcgccatcccactttgcatacttaccactttgttttgtgcaagggaatatttgcgctatgtccgcaatcactgaatccaaaccaacaagaagatgggcaatgcccgatacgttggtgattatcttttttgttgctattttaaccagccttgccacctgggtagttccggtggggatgtttgacagtcaggaagtgcagtatcaggttgatggtcaaacaaaaacacgcaaagtcgtagatccacacagttttcgcattctgactaacgaagcaggcgaacctgagtatcaccgcgtacagctgttcacgacgggcgatgaacgcccgggcctgatgaacttcccgtttgaaggattaaccagtggaagcaaatacgggacagccgttggcatcatcatgtttatgctggtgattggcggcgcgtttggcattgtgatgcgtacaggaaccattgataacggtatcctggcgcttattcgccatacccgcgggaatgaaattctctttattcctgcgctgtttattctgtttagtcttggcggcgcggtatttggtatgggagaagaggccgtcgcctttgccattatcatcgcaccgctaatggtccggctgggctatgacagtattaccaccgtcctggtgacctatattgccacgcaaatcggttttgccagtagctggatgaacccgttttgtgtggtcgttgctcaggggattgccggcgttccggtgctttctggctccgggttgcgtatcgtggtgtgggttatcgccactctgattggcctgatctttaccatggtgtacgccagtcgagtgaaaaagaatcctcttctgagtcgcgtgcatgagtccgaccgcttctttcgtgaaaagcaggctgatgttgaacaacgtccgtttacctttggtgactggctggtattgattgtcctga
